(19) United States
(12) Patent Application Publication
(10) Pub. No.: US 2026/0071192 A1
(43) Pub. Date: Mar. 12, 2026

(54) METHOD OF DEVELOPING DIVERSE SYNTHETIC PHAGE LIBRARIES TO OVERCOME RESISTANT KLEBSIELLA SPP.

(71) Applicant: United States of America as Represented by the Secretary of the Navy, Silver Spring, MD (US)

(72) Inventors: Jinny L. LIU, Ellicott City, MD (US); Scott DEAN, Bowie, MD (US); Biswajit BISWAS, Germantown, MD (US)

(21) Appl. No.: 19/321,394

(22) Filed: Sep. 8, 2025

Related U.S. Application Data
(60) Provisional application No. 63/692,873, filed on Sep. 10, 2024.

(51) Int. Cl. C12N 7/00; C07K 14/005

(52) U.S. Cl. CPC C12N 7/00; C07K 14/005; C12N 2795/00021; C12N 2795/00022

(57) ABSTRACT

Bacteriophages, also called phage, represent a tool to combat drug resistance in bacteria. Analysis revealed indicated that, for Klebsiella phage, the most important host range determining region is located at C-terminus (last ˜200 amino acids) of tail protein. A machine learning strategy was used to modify tail proteins of Klebsiella phage, thereby generating phages libraries effective in overcoming phage resistance in host bacteria. The technique is expected to be useful to modify other types of phages.

### CROSS-REFERENCE TO RELATED APPLICATIONS

[0001] This applications claims the benefit of U.S. Provisional Patent Application No. 63/692,873 filed on Sep. 10, 2024, which is incorporated herein by reference in its entirety.

### FEDERALLY-SPONSORED RESEARCH AND DEVELOPMENT

[0002] The United States Government has ownership rights in this invention. Licensing inquiries may be directed to NMRC OPBD, 503 Robert Grant Ave., Silver Spring, MD 20910-7500, or usn.detrick.nmrc.mbx.technology-transfer@health.mil, referencing Navy Case 211872.

### INCORPORATION BY REFERENCE

[0003] This Application incorporates by reference the Sequence Listing XML file submitted herewith via the patent office electronic filing system having the file name “211872US2 sequences.xml” and created on Aug. 27, 2025, with a file size of 1,705,299 bytes.

### BACKGROUND

[0004] Antibiotic resistance poses a demanding challenge in the treatment of bacterial infection. Synthetic phages tailored with desired properties, such as high potency and altered host ranges, offer a potential solution.

[0005] Advances in biology have provided necessary tools and strategies to generate desired synthetic phages. To alter host ranges, recombinant phage genomes with mutations in tail fibers in phages have been constructed in a yeast-based platform and then transformed into E. coli hosts to produce recombinant (also referred as synthetic) phages (Ando et al., 2015). Synthetic phages with smaller genomes of less than about 60 kb have been successfully constructed, however challenges exist in the construction of large phage genomes using yeast-based platforms. The recombination efficiency is usually low and the isolation of yeast artificial chromosome DNA with recombinant phage DNA has lower yield of the recombinant DNA. Another method to prepare synthetic coli phages was to assemble the synthetic phage genomes in vitro in combination with in vivo DNA transduction (Yosef et al., 2017; Kilcher et al., 2018). This approach involves the synthesis of large DNA sequences assembled by Gibson assembly, however, synthesis of large piece DNA fragments, over 10 kb, is difficult and costly. Another approach, based on the tail protein (gp17) crystal structure, was to introduce random mutations into critical loop domains within potential HRDR (host range determining region), subsequently cloned into E. coli plasmids and produced recombinant phages by the infection of parental phages (Yehl et al., 2019). The resulting synthetic coli phages were able to overcome drug resistant E. coli strains.

[0006] The above techniques struggle to overcome fast emerging pathogenic bacteria, such as Klebsiella spp. These species, mainly K. pneumoniae (Kp) and K. oxytoca, are major causes of bacterial nosocomial infections, including respiratory tract infections, urinary tract infections, and wound infections during prolonged field care. Such infections contribute to increased mortality and morbidity.

[0007] Klebsiella genomes are very flexible and easily recombined with each other to develop resistance to phages and antibiotics, such as carbapenems, by acquiring the ability to resist antibiotics. Their ease of acquiring drug resistance makes them labeled as emerging superbugs, thus rendering critical the development of potent synthetic phages as alternatives to antibiotics.

[0008] A need exists to address the limitations of phage therapy and combat the growing challenges of antimicrobial resistance and phage resistance in Klebsiella.

### BRIEF SUMMARY

[0009] Described herein are methods of developing synthetic Klebsiella phages, synthetic phage libraries containing diverse tail fiber sequences, and the phage sequences developed by these methods.

[0010] In a first embodiment, a method of preparing a synthetic bacteriophage library comprises the steps of providing a selection of bacteriophage sequences, using machine learning and structure prediction modeling to identify a likely receptor binding domain in the selection, then introducing random mutations therein and recombining them into the phage genomes to develop diverse synthetic phages. In further embodiments, the synthetic phages are testing against suitable bacteria to identify phages active against desired targets such as drug-resistant and/or phage-resistant bacteria.

[0011] A still further embodiment is a bacteriophage library in a state of having been developed via the method of the first embodiment.

[0012] In a phage embodiment, a bacteriophage comprises at least one mutation in a region selected from the group consisting of the BC loop, the EF loop, FG1 loop, and the FG2 loop, wherein the at least one mutation comprises a protein sequence selected from the group consisting of SEQ ID NOs: 19 to 88 in the BC loop, SEQ ID NOs: 90 to 123 in the EF loop, SEQ ID NOs: 125 to 175 in the FG1 loop, and SEQ ID NOs: 177 to 225 in the FG2 loop.

[0013] In another variation of the phage embodiment, said at least one mutation comprises two or more mutations in at least two of said loops comprise the mutations. In further variations, three or four of said loops comprise the mutations.

[0014] In a further variation of the phage embodiment, bacteriophage comprises a wild-type protein sequence of SEQ ID NO: 227 or SEQ ID NO: 228 prior to taking into account said one or more mutations.

[0015] In yet another variation of the phage embodiment, the bacteriophage is capable of infecting Klebsiella.

[0016] Still another embodiment is a nucleic acid encoding at least a portion of the C-terminal-most 200 amino acid residues of a phage tail protein sequence, wherein said at least a portion comprises at least one mutation in a region selected from the group consisting of the BC loop, the EF loop, FG1 loop, and the FG2 loop, wherein the at least one mutation comprises a protein sequence selected from the group consisting of SEQ ID NOs: 19 to 88 in the BC loop, SEQ ID NOs: 90 to 123 in the EF loop, SEQ ID NOs: 125 to 175 in the FG1 loop, and SEQ ID NOs: 177 to 225 in the FG2 loop.

[0017] Yet another embodiment is a phage library comprising a plurality of bacteriophage of the phage embodiments, wherein the bacteriophage comprise at least two different phages each having different mutations. In one aspect, the library comprises phage of both the Φ115 and Φ100 stock (SEQ ID NOs: 1 and 3, respectively) including mutations thereof as described herein.

[0018] Still further embodiments of phages and libraries thereof include phages having protein sequences encoded by SEQ ID NOs: 229 to 225 and minor variations thereof that encompass sequences of 99% or better identity. Additional embodiments are the nucleic acids of SEQ ID NOs: 229 to 225 and variations thereof that encode the same proteins due to codon degeneracy.

[0019] In still another embodiment, a method of treating bacterial infection comprises administering at least one phage or library thereof as described herein.

### BRIEF DESCRIPTION OF THE DRAWINGS

[0020] The patent or application file contains at least one drawing executed in color. Copies of this patent or patent application publication with color drawing(s) will be provided by the Office upon request and payment of the necessary fee.

[0021] FIGS. 1A-1C present a confusion matrix displaying the classification performance of gradient boosting models, Klebsiella vs. others, showing results of machine learning analysis for whether an unknown phage tail protein sequence binds to Klebsiella or a different species. The analysis used 143 Klebsiella phages tail fiber sequences and 642 other phage tail fibers. This indicates that the 200 amino acid residue region at the C terminal end of the tail protein (C-200) is a host range determining region (HRDR), as seen in FIG. 1A.

[0022] FIG. 2 shows the predicted structure for the C-terminal-most 200 amino acid residues (C-200) of Klebsiella phage tail fiber and identified loop domains in two different orientations.

[0023] FIG. 3 depicts an alignment of C-200 tail region showing the loop regions and highlighting areas where the synthetic phage described herein have mutations. The complete sequences of the two phage tail proteins shown, include the C-200 regions, are provided in SEQ ID NOs: 227 and 228.

[0024] FIG. 4 provides an electron micrographic image of typical phages obtained by these techniques. Imagery indicate that each phage has an icosahedral capsid (average diameter: 63.86 nm) and a flexible tail (average length: 164.36 nm), characteristic of the Siphoviridae family.

[0025] FIGS. 5A and 5b show results of testing of parental phage and synthetic phage library. The chart in FIG. 5A presents measurements of respiration rate of Klebsiella pneumoniae strain Kp294 in the presence of 4 synthetic phages and Kpφ115, Kpφ100 and Kpφ111 (also referred as φ115, φ100, and φ111, respectively). FIG. 5B depicts plates showing lawns of bacterial growth, with spots indicating lysis by the phage being tested at various dilutions. In the top left (position 1a) is the natural Kp294 bacteria with the parental φ115, indicating lysis. Below that in position 1b is the natural Kp bacteria and the synthetic phage library. In each remaining pair (2-6), the top plates (positions 2a-6a), representing five phage resistant strains, Kp294R1, R2, R6, R8 and R9, respectively, that were spotted with parental phage and the bottom plate (positions 2b-6b) those same strains spotted with the synthetic phage.

[0026] FIGS. 6A-6C relate to synthetic phage library growth on a panel of multi-drug resistant (MDR) MRSN of Klebsiella pneumoniae. FIG. 6A is a heatmap showing the growth of bacteria from the 96-strain clinical isolates panel. WT indicates φ115-1 stock containing the mixture of φ115 and φ100, while the other 4 are sub-libraries of synthetic phages. FIG. 6B depicts a plate showing a lawn of bacterial growth from strain MRSN 13761, with spots indicating lysis. The initial mixture of φ115 and φ100 showed no lysis at any dilution, and the synthetic phage sub library, FG1-φ115, showed clear lysis spots. FIG. 6C depicts a plate showing a lawn of bacterial growth from strain MRSN 25616. The WT showed no lysis at any dilution, while the sub-synthetic phage library, FG1-φ115 showed clear lysis spots.

[0027] FIGS. 7A and 7B offer a host range analysis of individual synthetic phages using a multi-drug resistance panel. FIG. 7A is a chart showing which synthetic phage isolates were able to lyse various strains from the panel. The chart depicts the parental phage strains, φ115 and φ100 and single isolated recombinant phage strains, isolates 1 and 6. FIG. 7B compares the number of strains lysed by the parental phages and selected isolates using both a liquid lysis test and a spot test on a bacterial lawn.

[0028] FIGS. 8A-8C relate to burst size measurements in three bacterial strains and four phages. Error bars represent standard deviation and each value was obtained from 2 biological replicate measurements. FIG. 8A presents a comparison of burst size measurements in Kp294 for the parental Φ115 and Φ100 compared to synthetic phage isolates numbers 1 and 6 (p=0.0031 for φ115 vs φ100; p=0.46 for φ115 vs isolate #6; p=0.28 for φ115 vs isolate #1). “*” represents p<0.005 (p=0.0031). FIG. 8B provides burst size measurements in Kp294R1. The value for Φ115 was measured at zero with no lysis observed. The two-sided t-test showed that p=0.45 for φ100 vs isolate #6 and p=54 for φ100 vs isolate #1. FIG. 8C shows provides burst size measurements in Kp294R1, a phage-resistant Kp294 variant. The value for Φ115 was measured at zero with no lysis observed. Two-sided t-test showed that p=0.31 for φ100 vs isolate #6 and p=21 for φ100 vs isolate #1.

[0029] FIG. 9 depicts a genomic sequence alignment showing the origin of the DNA in the genome of each synthetic phage isolate, indicating whether the DNA originated from the parental φ100 or φ115 or is unknown. Phage isolates 1, 6, 7 and 8, were isolated on MRSN 13761, while phage isolates 13 and 18 were isolated from Kp294R1. TF is abbreviated for tail fiber. STF stands for short tail fiber, while LTF stands for long tail fiber in φ100 genome. See Table 3 for sequence information.

### DETAILED DESCRIPTION

### Definitions

[0030] Before describing the present invention in detail, it is to be understood that the terminology used in the specification is for the purpose of describing particular embodiments and is not necessarily intended to be limiting. Although many methods, structures and materials similar, modified, or equivalent to those described herein can be used in the practice of the present invention without undue experimentation, the preferred methods, structures and materials are described herein. In describing and claiming the present invention, the following terminology will be used in accordance with the definitions set out below.

[0031] As used herein, the singular forms “a”, “an,” and “the” do not preclude plural referents, unless the content clearly dictates otherwise.

[0032] As used herein, the term “and/or” includes any and all combinations of one or more of the associated listed items.

[0033] As used herein, the term “about” when used in conjunction with a stated numerical value or range denotes somewhat more or somewhat less than the stated value or range, to within a range of 10% of that stated.

### Overview

[0034] The development of synthetic Klebsiella phage libraries described herein employed Klebsiella phages and corresponding bacterial hosts. With the aid of machine learning and structure prediction modeling, potential receptor binding domain within host-range-determining regions (HRDRs) in the tail fiber were identified. Then, random mutations were introduced into the binding domains and recombined into the phage genomes to develop diverse synthetic phages.

[0035] This method involved a parental phage scaffold, the corresponding host, and the primary sequence of tail fiber for predicting HRDR structure and identifying the potential loops without actual crystal structures. An in-house plasmid was developed for cloning the Klebsiella phage tail fiber gene and selected a Klebsiella pneumoniae host sensitive to kanamycin to produce the synthetic Klebsiella phages.

### Synthetic Phage

[0036] First a “chassis phage” was selected. The below examples primarily used Kpφ115, an anti-Klebsiella phage from Naval Medical Research Command with a genomic sequence provided in SEQ ID NO: 1. The genomes of related phage are described SED ID NOs: 2 and 3 (Kpφ111 and Kpφ100, respectively) and can also serve as chassis phage. Indeed, practically any phage could be modified using the techniques described herein.

[0037] A machine learning model was employed to locate potential receptor binding regions within Klebsiella tail fibers. A gradient boosting model trained in-house was performed on phage tail fibers. The gradient boosting model was implemented using Sci-Kit Learn framework in Python (Pedregosa et al., 2011). The gradient boosting model was ˜98% accurate at distinguishing Klebsiella phage tail proteins versus other bacterial hosts. This model, specifically GradientBoostingClassifie was trained on several different genomes, totaling 785 sequences, of which there were 143 Klebsiella phage tail proteins. FIGS. 1A-1C depict a confusion matrix from this analysis.

[0038] The machine learning analysis revealed indicated that the most important HRDR, effectively the phage receptor binding domain (RBD), is located at C-terminus (last ˜200 amino acids) of tail protein of Klebsiella phage as indicated in FIG. 1A. This prediction is somewhat different from the previous study by Yehl et al., who identified via a different method that the C-terminal region (˜100 amino acids) in gp17 altered the host specificity. In the present testing, use of only the C-terminal 100 amino acid provided significantly deteriorated performance (FIG. 1C compared to FIG. 1A), suggesting that Yehl et al. maybe have missed an important section of the tail fiber protein sequence. It is also possible that the discrepancy is from the inherent properties among different bacteria species. Use of in-house gradient boosting model enables very fine-grained highlighting of regions essential for binding and which specific amino acids are the top candidates for mutations, information useful to guide mutation selection to generate phage diversity.

[0039] The predicted structure of tail fiber protein shows a barrel for HRDR (FIG. 2). The identified loop domains are exposed on the exterior of the barrel and likely bind to bacterial receptors.

[0040] A synthetic phage scaffold derived from Naval Medical Research Command phage Kpφ115 was used for structure prediction of the tail fiber protein. Alphafold and Alphafold 2 were used for predicting the structure and locating the potential loop domains binding to bacterial receptors.

[0041] For cloning of phage tail fibers, a new plasmid backbone (PETori-Kan-Ori-f1 DNA fragment, 2085 bp) with Kanamycin resistant markers was constructed by PCR amplification. This involved pet28a as template and primers, pKan115TF F1/pKan115TF Rev. Kp tail fiber (TF) DNA fragments (3771 bp) were amplified using Kpφ115 as template with primers Kpφ115TF F1/Kpφ115 Rev (see Table 1). Amplified pET ori-Kan-f1ori DNA fragments and Kp TF DNA fragments were purified and ligated by Gibson assembly (New England Biolabs). The resulting plasmids, pKp115-19, were then transformed to DH5α/DH10β according to manufacturer's protocol, following plating the bacteria onto LB plus kanamycin (50 μg/mL) agar plates and incubating the plates at 37° C. overnight. The next day, five colonies were selected and grown in 2 mL TB (Terrific broth) mixed with 50 μg/mL kanamycin at 37° C. shaking at 250 rpm overnight. DNA were isolated using miniprep kit (Qiagen) and sent out to sequence using Kpφ115TF seq F1, Kpφ115TF seq F5, Kpφ115TF seq R1/R4/R5.

[0042] Phage tail variants were generated by introducing random mutations into the predicted loop domain. Klebsiella phage tail variants were amplified using pKp115-19 DNA and 4 primer pairs, Kpφ115TF BClp F1/Kpφ115TF BC lp R1, Kpφ115TF EFlp F1/Kpφ115TF EFlp R1, Kpφ115 FGlp F1/Kpφ115 FGlp R1, and Kpφ115TF FGlp2 F2/Kpφ115TF FGlp2 R2 (listed in Table 1) according to manufacturer's protocol (Q5 DNA polymerase, New England Biolabs). The resulting PCR fragments were then separated on 1% Tris acetate EDTA agarose gel and purified using QIAQUICK gel purification kit followed by QIAQUICK PCR kit (Qiagen Inc). The resulting linear PCR DNA fragments (0.1-0.5 μg) were then re-ligated using HIFI builder (NEB) followed by transformation into competent DH5α cells (New England Biolabs) using 4 tubes of cells. For each tube, 1 mL of outgrowth medium were added at 37° C. with shaking for 1 hr, then 9 mL of LB mixed with kanamycin, and shaken 250 rpm at 37° C. for overnight. A small aliquot was taken to plate for calculating titer. The next day, the cultures were pooled, and 4 mL of culture were frozen as phage tail library in 15 glycerol and stored at −80 (C. The rest of them were spun down for DNA extraction. Purified DNA (1 μg) was electroporated into freshly prepare Kp294 without glycerol. Ten tubes of freshly prepared cells were used, pooled and plated onto a large LB agar plate with kanamycin (Corning). Small aliquots with serial dilutions were also plated onto small plates. Plates were incubated in a 37° C. incubator overnight. The next day transformed Kp294 were scraped into LB supplemented with kanamycin and 15% glycerol and frozen at −80° C. Four independent tail libraries were constructed that varied in BC, EF and FG1 and FG2 loops separately (see FIG. 3 and Table 2 for these loops).

TABLE 1
Primer sequences for constructing pKan φ115
tail fiber (TF) into pKan28 backbone, TF loop
variants, and sequencing TF recombinant clones.
K represents guanine or thymine.

| Name | | | Tm |
|---|---|---|---|
| of oligo | Sequence 5′ | length | (° C.) |
| Kp φ115TF | GTCCCATTCGCCAatgac | 34 | 68 |
| F1 | taatatcaaggcccgc | | |
| | (SEQ ID NO: 4) | | |
| Kp φ115TF | GCCTATGGAAAAACctag | 40 | 61 |
| Rev | actactattctatttcct | | |
| | tttc | | |
| | (SEQ ID NO: 5) | | |
| pKan115TF | CACTGGATCATGGTAAGT | 36 | 68 |
| F1 | TTTTCCATAGGCTCCGCC | | |
| | (SEQ ID NO: 6) | | |
| pKan115TF | ttgatattagtcatTGGC | 32 | 67 |
| Rev | GAATGGGACGCGCC | | |
| | (SEQ ID NO: 7) | | |
| Kpφ115TF | GTGTAGCGGTCACGCTGC | 18 | 60 |
| seq F1 | (SEQ ID NO: 8) | | |
| Kp φ115TF | AGGAGCATCGATACGAAC | 22 | 60 |
| seq F5 | CTGA | | |
| | (SEQ ID NO: 9) | | |
| Kpφ115 TF | TTATAGTCCTGTCGGGTT | 22 | 59 |
| seq R1 | TCGC | | |
| | (SEQ ID NO: 10) | | |
| Kp φ115TF | CTGTATGCCGATATGTAT | 28 | 62 |
| seq R4 | GCCCTCTCTC | | |
| | (SEQ ID NO: 11) | | |
| Kp φ115TF | ATGTATGCCCTCTCTCTG | 28 | 60 |
| Fseq R5 | ATAAAACCAG | | |
| | (SEQ ID NO: 12) | | |
| Kpφ115TF | ggaagggggaaatagaat | 72 | 69 |
| BClp F1 | tctacagtatagacNNKN | | |
| | NKNNKNNKNNKggtacaa | | |
| | gagcatacgcgctacgtg | | |
| | (SEQ ID NO: 13) | | |
| Kpφ115 TF | gtctatactgtagaattc | 32 | 60 |
| BClp R1 | tatttcccccttcc | | |
| | (SEQ ID NO: 14) | | |
| Kpφ115TF | aagagaataggatcatcg | 64 | 68 |
| EFlp F1 | ttagggtaNNKNNKNNKN | | |
| | NKNNKNNKagcagcataa | | |
| | aaacattcac | | |
| | (SEQ ID NO: 15) | | |
| Kpφ115TF | taccctaacgatgatcct | 30 | 62 |
| EFlp R1 | attctcttgccc | | |
| | (SEQ ID NO: 116) | | |
| Kpφ115TF | agcagcataaaaacattc | 72 | 70 |
| FGlp1F1 | actccaNNKNNKNNKNNK | | |
| | NNKNNKNNKNNKNNKgga | | |
| | caagaaacgtctgatgga | | |
| | gtc | | |
| | (SEQ ID NO: 17) | | |

[0043] Approximately 50 μL of these frozen independent phage tail libraries (as described immediately above) were inoculated into 70 mL of LB mixed with kanamycin and grown into log phase (0.5-0.7 at A600). 10 mL of the log phase cells were then infected with φ115 stocks at multiple of infection (moi) 0.1 for 3 hrs. 400 μL of ChCl₃ were added into the culture and cells were spun down to collect the supernatant. Phages were tittered on various Klebsiella spp.

[0044] For sequencing, PCR fragments (354 bp) were amplified using synthetic phages in phage libraries as DNA templates and primers, Kpφ115TF seq F5 and Kpφ115TF seq R4. The resulting DNA fragments were separated by running 1% agarose running under 1× Tris Acetate-EDTA buffer. The 354 bp DNA fragments were then purified by QIAQUICK gel purification kit followed by QIAQUICK PCR purification kit (Qiagen). Approximately 2 μg of purified DNA was sent out for commercial Next Generation Sequencing (Genewiz) to confirm variations in loop sequences found within the phage libraries. Selected sequences appear below in Table 2. The first row in Table 2 (SEQ ID Nos: 18, 89, 124, and 176) represents the wild-type phage sequence. The columns in Table 2 should be considered as independent from one another, i.e., the sequence at one position in a row is not necessarily related to the sequences in the other positions (columns) in the same row.

TABLE 2
Variants in loop sequences found in
synthetic phage libraries as compared to
wild-type sequences (top row).

| BC loop | EF loop | FG1 loop | FG2 loop |
|---|---|---|---|
| TGNDG (SEQ ID NO: 18) | TQSGRG | WVERDNGTT | QETSDGVIYN |
| | (SEQ ID | (SEQ ID NO: 124) | (SEQ ID NO: 176) |
| | NO: 89) | | |
| NGNDG (SEQ ID NO: 19) | PQSGRG | WVERDNGNT | QETPDGVIYN |
| | (SEQ ID | (SEQ ID NO: 125) | (SEQ ID NO: 177) |
| | NO: 90) | | |
| TGNAG (SEQ ID NO: 20) | TQNGRG | WVERYNGTT | QETSDGVLYN |
| | (SEQ ID | (SEQ ID NO: 126) | (SEQ ID NO: 178) |
| | NO: 91) | | |
| TGNNG (SEQ ID NO: 21) | TQRGRG | WVARDNGTT | QETHDGVIYN |
| | (SEQ ID | (SEQ ID NO: 127) | (SEQ ID NO: 179) |
| | NO: 92) | | |
| TGDDG (SEQ ID NO: 22) | TPSGRG | WVERDNETT | QETSAGVIYN |
| | (SEQ ID | (SEQ ID NO: 128) | (SEQ ID NO: 180) |
| | NO: 93) | | |
| TGTDG (SEQ ID NO: 23) | AQSGRG | WVGRDNGTT | HETSDGVIYN |
| | (SEQ ID | (SEQ ID NO: 129) | (SEQ ID NO: 181) |
| | NO: 94) | | |
| TENDG (SEQ ID NO: 24) | GQPILR | FKVAQLCQV | KGCVGCLWVV |
| | (SEQ ID | (SEQ ID NO: 130) | (SEQ ID NO: 182) |
| | NO: 95) | | |
| AGNDG (SEQ ID NO: 25) | NQSGRG | GVERGNGTT | LDRSLCLRGS |
| | (SEQ ID | (SEQ ID NO: 131) | (SEQ ID NO: 183) |
| | NO: 96) | | |
| TGNEG (SEQ ID NO: 26) | SQSGRG | LVFAGDGSL | QDPSDGVIYN |
| | (SEQ ID | (SEQ ID NO: 132) | (SEQ ID NO: 184) |
| | NO: 97) | | |
| TGSDG (SEQ ID NO: 27) | SRKALE | RRVKVFLLT | QEKPDGVIYN |
| | (SEQ ID | (SEQ ID NO: 133) | (SEQ ID NO: 185) |
| | NO: 98) | | |
| TGHDG (SEQ ID NO: 28) | TCFVLF | RVERDNGTT | QEMSDGVIYN |
| | (SEQ ID | (SEQ ID NO: 134) | (SEQ ID NO: 186) |
| | NO: 99) | | |
| PGNDG (SEQ ID NO: 29) | TESGRG | SGAVPSTWG | QEPSDGVIYN |
| | (SEQ ID | (SEQ ID NO: 135) | (SEQ ID NO: 187) |
| | NO: 100) | | |
| TGNDE (SEQ ID NO: 30) | THSGRG | WAERDNGTT | QEPSNGVIYN |
| | (SEQ ID | (SEQ ID NO: 136) | (SEQ ID NO: 188) |
| | NO: 101) | | |
| TRNDG (SEQ ID NO: 31) | TQSGGG | WGERDNGTT | QETSDGAIYN |
| | (SEQ ID | (SEQ ID NO: 137) | (SEQ ID NO: 189) |
| | NO: 102) | | |
| RRPGL (SEQ ID NO: 32) | TQSGKG | WIERDNGTT | QETSDGVICN |
| | (SEQ ID | (SEQ ID NO: 138) | (SEQ ID NO: 190) |
| | NO: 103) | | |
| TGNDR (SEQ ID NO: 33) | TQSGMG | WVEGDNGTT | QETSDGVIYH |
| | (SEQ ID | (SEQ ID NO: 139) | (SEQ ID NO: 191) |
| | NO: 104) | | |
| NRNDG (SEQ ID NO: 34) | TQSGSG | WVERDHGTT | QETSDGVIYK |
| | (SEQ ID | (SEQ ID NO: 140) | (SEQ ID NO: 192) |
| | NO: 105) | | |
| PGHDG (SEQ ID NO: 35) | TQSRRG | WVERDNGAN | QETSDGVIYT |
| | (SEQ ID | (SEQ ID NO: 141) | (SEQ ID NO: 193) |
| | NO: 106) | | |
| SGNDG (SEQ ID NO: 36) | TQSWRG | WVERDNGTN | QETSDGVVYN |
| | (SEQ ID | (SEQ ID NO: 142) | (SEQ ID NO: 194) |
| | NO: 107) | | |
| TGNDV (SEQ ID NO: 37) | TRSGRG | WVERDNRTT | QETSNGVIYN |
| | (SEQ ID | (SEQ ID NO: 143) | (SEQ ID NO: 195) |
| | NO: 108) | | |
| IGNDG (SEQ ID NO: 38) | TKSGRN | WVERGNGTT | QETYDGVIYN |
| | (SEQ ID | (SEQ ID NO: 144) | (SEQ ID NO: 196) |
| | NO: 109) | | |
| TVNDG (SEQ ID NO: 39) | TQSGRD | WVESDNGTT | QGTSDGVIYN |
| | (SEQ ID | (SEQ ID NO: 145) | (SEQ ID NO: 197) |
| | NO: 110) | | |
| TCNDG (SEQ ID NO: 40) | TQSGRS | WVEREIGRA | QKTSDGVIYN |
| | (SEQ ID | (SEQ ID NO: 146) | (SEQ ID NO: 198) |
| | NO: 111) | | |
| TGKDG (SEQ ID NO: 41) | KIGRAH | DRKSTRLNS | RIRLLLSVRF |
| | (SEQ ID | (SEQ ID NO: 147) | (SEQ ID NO: 199) |
| | NO: 112) | | |
| TGNYR (SEQ ID NO: 42) | RSEEHT | GVERDNGTT | RTMFMQTCVS |
| | (SEQ ID | (SEQ ID NO: 148) | (SEQ ID NO: 200) |
| | NO: 113) | | |
| TGTEG (SEQ ID NO: 43) | RSEERR | LRDRRSLVV | RVRQTWPGSG |
| | (SEQ ID | (SEQ ID NO: 149) | (SEQ ID NO: 201) |
| | NO: 114) | | |
| TRNNG (SEQ ID NO: 44) | TDRKST | RSEEHKSEL | RWFPGESEVC |
| | (SEQ ID | (SEQ ID NO: 150) | (SEQ ID NO: 202) |
| | NO: 115) | | |
| AGHDG (SEQ ID NO: 45) | TQIGRA | RSEERRVGK | SGCTRIKSVS |
| | (SEQ ID | (SEQ ID NO: 151) | (SEQ ID NO: 203) |
| | NO: 116) | | |
| AGNDR (SEQ ID NO: 46) | TQRDRK | WRSEEHTSE | SWFSRLPLVG |
| | (SEQ ID | (SEQ ID NO: 152) | (SEQ ID NO: 204) |
| | NO: 117) | | |
| CRPGL (SEQ ID NO: 47) | TQSEIG | WRSEERRVG | TGSTIHVMNS |
| | (SEQ ID | (SEQ ID NO: 153) | (SEQ ID NO: 205) |
| | NO: 118) | | |
| NGNAG (SEQ ID NO: 48) | TQSGDR | WVDRKSTRL | VYRESSGSKV |
| | (SEQ ID | (SEQ ID NO: 154) | (SEQ ID NO: 206) |
| | NO: 119) | | |
| NGNGG (SEQ ID NO: 49) | TQSGKI | WVEIGRASC | WTLKLWVVML |
| | (SEQ ID | (SEQ ID NO: 155) | (SEQ ID NO: 207) |
| | NO: 120) | | |
| NGTDG (SEQ ID NO: 50) | TQSGRE | WVEKDNGTT | LTGSEVWIVK |
| | (SEQ ID | (SEQ ID NO: 156) | (SEQ ID NO: 208) |
| | NO: 121) | | |
| NRTEV (SEQ ID NO: 51) | TQSGRR | WVEKIGRAH | PLASFWRSSL |
| | (SEQ ID | (SEQ ID NO: 157) | (SEQ ID NO: 209) |
| | NO: 122) | | |
| NVNDG (SEQ ID NO: 52) | TQSGRV | WVEKIGRAS | QDRKSTRRTP |
| | (SEQ ID | (SEQ ID NO: 158) | (SEQ ID NO: 210) |
| | NO: 123) | | |
| PGDDG (SEQ ID NO: 53) | | WVERDKDRK | QDTPYGVIYN |
| | | (SEQ ID NO: 159) | (SEQ ID NO: 211) |
| PGNDE (SEQ ID NO: 54) | | WVERDKIGR | QEDRKSVVEG |
| | | (SEQ ID NO: 160) | (SEQ ID NO: 212) |
| PGRAG (SEQ ID NO: 55) | | WVERDNEIG | QETPAGVIYN |
| | | (SEQ ID NO: 161) | (SEQ ID NO: 213) |
| PGTDG (SEQ ID NO: 56) | | WVERDNGAT | QETPDGAIYN |
| | | (SEQ ID NO: 162) | (SEQ ID NO: 214) |
| TENEG (SEQ ID NO: 57) | | WVERDNGDR | QETPDGVIYK |
| | | (SEQ ID NO: 163) | (SEQ ID NO: 215) |
| TGDAG (SEQ ID NO: 58) | | WVERDNGKI | QETPDGVIYR |
| | | (SEQ ID NO: 164) | (SEQ ID NO: 216) |
| TGHAG (SEQ ID NO: 59) | | WVERDNGTR | QETPNGVIYN |
| | | (SEQ ID NO: 165) | (SEQ ID NO: 217) |
| TGNAR (SEQ ID NO: 60) | | WVERDNRSE | QETSDGDRKS |
| | | (SEQ ID NO: 166) | (SEQ ID NO: 218) |
| TGNGG (SEQ ID NO: 61) | | WVERDRKST | QETSDGVDRK |
| | | (SEQ ID NO: 167) | (SEQ ID NO: 219) |
| TGNYG (SEQ ID NO: 62) | | WVERDRKSV | QETSDGVIRS |
| | | (SEQ ID NO: 168) | (SEQ ID NO: 220) |
| TGTDR (SEQ ID NO: 63) | | WVERDRSEE | QETSDGVIYS |
| | | (SEQ ID NO: 169) | (SEQ ID NO: 221) |
| TRDDG (SEQ ID NO: 64) | | WVEREDRKS | QETSDRVIYN |
| | | (SEQ ID NO: 170) | (SEQ ID NO: 222) |
| TRHDG (SEQ ID NO: 65) | | WVERRSEEH | QETSRSEEHT |
| | | (SEQ ID NO: 171) | (SEQ ID NO: 223) |
| TRNDE (SEQ ID NO: 66) | | WVERRSEER | QETYDGVVYN |
| | | (SEQ ID NO: 172) | (SEQ ID NO: 224) |
| TVTDV (SEQ ID NO: 67) | | WVERSEEHT | QIGRASCRER |
| | | (SEQ ID NO: 173) | (SEQ ID NO: 225) |
| VINVS (SEQ ID NO: 68) | | WVRSEEHTS | |
| | | (SEQ ID NO: 174) | |
| TGHDV (SEQ ID NO: 69) | | WVXRDNGTT | |
| | | (SEQ ID NO: 175) | |
| TGNRS (SEQ ID NO: 70) | | | |
| AGDDG (SEQ ID NO: 71) | | | |
| PGNER (SEQ ID NO: 72) | | | |
| RSEER (SEQ ID NO: 73) | | | |
| TDRKS (SEQ ID NO: 74) | | | |
| TEIGR (SEQ ID NO: 75) | | | |
| TEMTE (SEQ ID NO: 76) | | | |
| TETDG (SEQ ID NO: 77) | | | |
| TETNG (SEQ ID NO: 78) | | | |
| TGDRK (SEQ ID NO: 79) | | | |
| TGKDR (SEQ ID NO: 80) | | | |
| TGNDK (SEQ ID NO: 81) | | | |
| TGNED (SEQ ID NO: 82) | | | |
| TGNEI (SEQ ID NO: 83) | | | |
| TGPDG (SEQ ID NO: 84) | | | |
| TGRSE (SEQ ID NO: 85) | | | |
| TRNAG (SEQ ID NO: 86) | | | |
| TRSEE (SEQ ID NO: 87) | | | |
| TRTDG (SEQ ID NO: 88) | | | |

[0045] Exemplary phage tail fiber proteins sequences are SEQ ID NOs: 226, 227, and 228 which are those of the phages Kpφ100, Kpφ115, and Kpφ111, respectively. FIG. 2 shows the predicted structure for the C-terminal-most 200 amino acid residues (C-200) of Klebsiella phage tail fiber and identified loop domains in two different orientations. The mutations described in Table 2 could be made other phages possessing a similar structure. The C-200 region is believed to be most critical for host determination.

[0046] FIG. 3 depicts an alignment of the C-terminal-most 200 amino acid residues in the tail regions of Kpφ115 and Kpφ111. One can see the lettered regions between which lie the highlighted loop regions where the synthetic phage described herein have mutations. These are the loops identified in Table 2 above (BC, EF, FG1, and FG2). The complete sequences of the two phage tail proteins shown, which include the C-200 regions of FIG. 3, are provided in SEQ ID NOs: 227 and 228, respectively.

### Phage Activity

[0047] The synthetic phage libraries were characterized using spot tests and plaque assays with various Klebsiella pneumoniae strains. For spot tests, Kp hosts were grown to log phase (A600=0.4-0.6) first and mixed with LB (M) top agar (0.6%) to create bacterial lawns. Phage samples were serially diluted, and 10 μL of each dilution was carefully spotted onto the solidified top agar layer, which was overlaid on either LB (M) or TS plates. Following incubation, individual plaques that formed within each spot were counted. The number of plaques was then used to calculate the overall titer for each tested phage, expressed as plaque-forming units per milliliter (PFU/mL), taking into account the dilution factor and the spotted volume.

[0048] As a measure of phage resistance, an OMNILOG liquid lysis assay was used to measure the respiration rate among the infected Kp and control without infection. In brief, bacteriophage growth was monitored in OMNILOG system with the respiration rate, in which the Kp was growth in tryptic-soy broth (TS) supplemented with 1% tetrazolium redox dye and challenged by the phages. The plate incubator recorded well color every 15 minutes as respiration of actively growing bacteria reduce the dye and generate a quantitative purple signal. Successful phage infection is measured by low or absent of color change due to suppressed bacterial respiration. The bacterial growth was measured over a 24-hour period.

[0049] Low levels of bacterial respiration indicate successful bacterial lysis, while high respiration levels suggest continued bacterial growth. As expected, Kp294 alone and Kp294 infected with the non-lytic phage KpΦ111, a natural phage lysed Kp159, exhibited high respiration rates, similar to the uninfected control (FIG. 5A). In contrast, Kp294 infected with the four sub-synthetic phage libraries displayed low to no respiration (FIG. 5A), indicating effective bacterial lysis. Consistent with the respiration data, the sub-synthetic phage libraries produced clear zones of lysis on lawns of six phage-resistant Kp294 derivative strains (Kp294R) (FIG. 5B). The parental Φ115-1 and Φ115-2, however, did not produce visible plaques on these resistant strains, highlighting the enhanced infectivity of the synthetic phage libraries. Importantly, the synthetic phages also successfully infected and lysed the parental Kp294 strain.

[0050] A Kp multidrug resistance diversity panel (see Martin M J et al. “A panel of diverse Klebsiella pneumoniae clinical isolates for research and development.” Microb Genom 9(5):mgen000967 (2023)) of 96 distinct drug-resistance strains was used for testing the lysis assay. A 96-well plate was inoculated with the distinct Klebsiella strains. Bacterial cultures were grown overnight in LB media under shaking conditions at 37° C. Following incubation, the bacteria were diluted at a ratio of 1:30 by combining 5 μL of Klebsiella culture with 145 μL of LB media per well. Initial optical density (OD) measurements at 600 nm (A600) were recorded for each well to establish baseline growth. The plate was then incubated with shaking for 1 hour at 37° C. to allow bacteria to enter exponential growth phase. After the initial growth period, phages were added to each well and A600 measurements were immediately recorded to document the starting point for potential lysis. The plate was returned to the 37° C. shaking incubator for continued growth. Subsequent A600 measurements were taken at 1-hour intervals for all wells until the lysis process was complete, as indicated by stabilization of OD readings.

[0051] To assess the lytic activity of the synthetic phage libraries against the panel of drug-resistant Kp strains, a liquid lysis assay under standardized conditions was used. This approach allowed for efficient screening of phage activity against multiple strains simultaneously. A lysis heat map comparing the initial Kpφ115-1 stock (containing a low titer of φ100) to the four synthetic phage sub-libraries revealed a broader host range for the engineered phages (FIG. 6A). The synthetic libraries consistently lysed a greater number of drug-resistant Kp strains compared to the parental phage mixture. These findings were further corroborated by spot tests using two clinical isolates from the MRSN panel, Kp13 (MRSN 13761) and Kp33 (MRSN 25616). While the parental phage mixture failed to lyse these strains, the FG1 synthetic phage sub-library produced visible plaques (FIG. 6B), demonstrating its enhanced lytic capability.

[0052] Host range analysis was performed on sixteen individual phages isolated from synthetic phage library Lib 1, following three rounds of enrichment on Kp strains, Kp13 and Kp294R1. Nine isolates were selected for further analysis via multiplex liquid lysis assays, alongside parental phages φ115, φ100, Lib 1, and Lib 2. The profiles for two isolates, #1 and #6 and Lib 1, φ115 and φ100 were listed in FIG. 7A. Isolate #6 exhibited the broadest host range, lysing 10 MRSN Kp strains in liquid culture. Subsequent spot assays confirmed plaque formation by isolate #6 on 8 of these strains (FIG. 7B). While the parental phage φ115-1 lysed 2 strains in liquid culture and only 1 on plates, φ100 demonstrated activity against 7 and 3 strains in liquid and spot assays, respectively. Notably, all tested individual isolates displayed an extended host range compared to both φ100 and φ115-1 when challenged against a panel of 96 multi-drug resistant Kp stains.

[0053] To determine the number of phages produced per infected bacterium, burst size analysis was performed using Klebsiella pneumoniae strains Kp294, Kp303, and Kp294R1 with the following phages: Kpφ115, Kpφ100, isolate #6, and isolate #1. The procedure began by mixing 11 mL of LB medium with 110 μL of an overnight culture of bacteria in a 50 mL conical tube flask (designated as culture 1). This mixture was incubated at 37° C. with shaking at 250 rpm until the optical density reached 0.25. At this point, 1.00×10⁷ bacteriophages were added to 10 mL of log phase cultures (multiplicity of infection=0.005), and timing was initiated. After 5 minutes of incubation at 37° C. without shaking, 100 μL of culture 1 was transferred to a fresh 10 mL of pre-warmed (37° C.) LB medium (designated as culture 2). At 5.5 minutes post-infection, 1 mL from culture 2 was transferred into a 1.5 mL centrifuge tube, and a 20 μL sample was quickly transferred into a PCR tube for Titer 1 measurement (non-adsorbed phages). Subsequently, 50 μL of chloroform was added to the centrifuge tube and vortexed, after which a 20 μL sample was transferred into another PCR tube for Titer 2 measurement. Following 30 minutes of incubation, during which cell lysis occurred resulting in only free phages, 1 mL from culture 2 was transferred into a 1.5 mL tube. After adding 50 μL of chloroform and vortexing, a 20 μL sample was transferred into a PCR tube for Titer 3 measurement. The number of initially infected cells (Ni) was calculated as Titer 2 minus Titer 1, and the burst size was determined by dividing Titer 3 by Ni. Two biological replicates were measured for standard error (SD) and two-sided t-test were used for measuring probability of difference (p<0.005 considered as significant difference).

[0054] Burst size measurements were conducted according to the phage propagation protocol described above. While φ115-3 (phage stock developed from a single plaque growing on Kp294, but not on Kp303) exhibited a burst size of approximately 50 PFU per bacterium in Kp294, φ100 had a significantly smaller burst size (p<0.005) (FIG. 8A). In contrast, both isolate #6 and isolate #1 were not significantly different from φ115 (p>0.005). φ115-3 failed to produce detectable titers on strains Kp303 and Kp294R1, but the burst size for isolate #6 and isolate #1 were not significantly different from φ100 (p>0.005 in Kp303 and Kp294R1) (FIGS. 8B and 8C). Interestingly, isolate #1 exhibited a considerably larger burst size (30 PFU/CFU) compared to both φ100 and isolate #6 in strain Kp294R1, though still not significantly (p>0.005 listed in FIG. 8C).)

### Individual Phage Sequencing

[0055] To isolate individual phage strain from a mixed library, a three-round purification protocol was implemented. In the first round, the phage library was plated on a bacterial lawn, and a single, well-isolated plaque was selected and picked using a sterile pipette tip. This plaque was then used to inoculate an exponential growth culture of the host bacteria, followed by incubation at 37° C. until complete lysis was observed. The lysate was filtered to remove bacterial debris, and the resulting filtrate was used for a second round of plating. From this second plate, another single plaque was selected, and the process of liquid culture growth and filtration was repeated. A third and final round of plaque isolation, growth, and filtration was performed to ensure the resulting phage preparation contained only a single phage strain. This rigorous three-round isolation procedure effectively eliminated contaminating phages, yielding a genetically homogeneous phage isolate for subsequent characterization.

[0056] A phenol-chloroform DNA extraction was used to obtain phage genomic DNA. Phages were triple plaque-purified, then each isolate was amplified at 37° C. by infecting a 100 mL culture of Kp host until complete lysis occurred, then DNA extraction was performed on the lysate. Lysates were passed through a 0.22 μm filter and treated with DNAseI plus MgCl₂ to digest un-encapsulated DNA. Capsids were then disrupted with proteinaseK and SDS, and the genomes were extracted twice with phenol-chloroform-isoamyl alcohol. After debris and phage removal, genomic DNA was subsequently precipitated with PEG/NaCl, washed in 80% ethanol, resuspended in water, subjected to RNAse A digestion, re-extracted, ethanol-precipitated, and finally washed in 70% ethanol before resuspended in sterile water. Quality control was performed via agarose-gel confirmation of high molecular weight DNA, Qubit fluorimetry for concentration, and NanoDrop spectrophotometry for purity, before storage at 4° C. (−20° C. for long-term storage).

[0057] Isolated phage sequences are provided in SEQ ID NOs: 229 to 225. Table 3 below references these sequence identification numbers against the isolate numbers referred to herein.

TABLE 3
Cross-reference of isolate numbers and SEQ ID NOs.

| Synthetic phage isolate number | SEQ ID NO: |
|---|---|
| 1 | 230 |
| 6 | 231 |
| 7 | 232 |
| 8 | 233 |
| 13 | 235 |
| 14 | 236 |
| 17 | 237 |
| 18 | 238 |

[0058] Genomic DNA sequencing revealed that each isolate harbored segments from both the Kpφ100 and φ115 genomes, albeit at varying ratios and locations (FIG. 9). Notably, isolates derived from Kp294R1 (phage isolate 13 and 18 exhibited a predominance of the φ100 genome, including both long tail fiber (LTF) and short tail fiber (STF) genes. In contrast, isolates (#1, #6) originating from Kp13 displayed a higher proportion of the φ115. Interestingly, isolates #1 and #6, while both possessing the φ115 major capsid genes, differed in their tail fiber composition: #1 contained the φ115 LTF and φ100 STF, whereas #6 harbored both φ100 tail fibers. Isolates #7, #8, #13 and #18 were characterized by a majority of φ100 genomic DNA (FIG. 9).

### Further Embodiments

[0059] Contemplated herein are phages and libraries thereof created against other bacteria besides the Klebsiella as described above. These can be developed using machine learning and structure prediction modeling to identify a likely receptor binding domain, then introducing random mutations therein and recombining them into the phage genomes to develop diverse synthetic phages.

[0060] Also contemplated herein is treatment with phages and libraries thereof produced as described. A method for treating or preventing infection in a subject in need thereof (for example a mammal such as a human) can include administering to the subject a composition comprising at least one bacteriophage as described herein and a pharmaceutically acceptable carrier; wherein the composition is administered at a dose sufficient to reduce the level of the at least one bacterium in the subject. In various aspects, the infection is a Klebsiella infection.

### Advantages

[0061] This technique can be used to prepare synthetic diverse phages in a shorter time than a yeast platform. The method has the flexibility to make synthetic phages that target other bacteria species. Phages with a large genomic DNA can also be used as scaffolds to prepare synthetic phages.

### Concluding Remarks

[0062] All documents mentioned herein are hereby incorporated by reference for the purpose of disclosing and describing the particular materials and methodologies for which the document was cited.

[0063] Although the present invention has been described in connection with preferred embodiments thereof, it will be appreciated by those skilled in the art that additions, deletions, modifications, and substitutions not specifically described may be made without departing from the spirit and scope of the invention. Terminology used herein should not be construed as being “means-plus-function” language unless the term “means” is expressly used in association therewith.

### REFERENCES

[0064] 1. Kevin Yehl, Sébastien Lemire, Andrew C Yang, Hiroki Ando, Mark Mimee, Marcelo Der Torossian Torres, Cesar de la Fuente-Nunez, Timothy K Lu (2019) Engineering Phage Host-Range and Suppressing Bacterial Resistance through Phage Tail Fiber Mutagenesis. Cell, 179(2): 459-469.
[0065] 2. Hiroki Ando, Sebastien Lemire, Diana P.Pires, Timothy K.Lu. (2015) Engineering Modular Viral Scaffolds for Targeted Bacterial Population Editing. Cell Systems, 1(3):187-196.
[0066] 3. Ido Yosef, Moran G. Goren, Rea Globus, Shahar Molshanski-Mor, and Udi Qimron (2017) Extending the Host Range of Bacteriophage Particles for DNA Transduction. Molecular Cell 66, 721-728.
[0067] 4. Pedregosa F, Varoquaux G, Gramfort A, Michel V, Thirion B, Grisel 0, et al. Scikit-learn: Machine Learning in Python. J Mach Learn Res. 2011; 12:2825-30.
[0068] 5. Samuel Kilcher, Patrick Studer, Christina Muessner, Jochen Klumpp, and Martin J. Loessne (2018) Cross-genus rebooting of custom-made, syntheticbacteriophage genomes in L-form bacteria. PNAS 115(3):567-572.
[0069] 6. Taslem Mourosi J, Awe A, Guo W, Batra H, Ganesh H, Wu X, Zhu J. Understanding Bacteriophage Tail Fiber Interaction with Host Surface Receptor: The Key “Blueprint” for Reprogramming Phage Host Range. Int J Mol Sci. 2022 Oct. 12; 23(20):12146. doi: 10.3390/ijms232012146. PMID: 36292999; PMCID: PMC9603124.

1. A bacteriophage comprising:
at least one mutation in a region selected from the group consisting of the BC loop, the EF loop, FG1 loop, and the FG2 loop,
wherein the at least one mutation comprises a protein sequence selected from the group consisting of SEQ ID NOs: 19 to 88 in the BC loop, SEQ ID NOs: 90 to 123 in the EF loop, SEQ ID NOs: 125 to 175 in the FG1 loop, and SEQ ID NOs: 177 to 225 in the FG2 loop.

2. The bacteriophage of claim 1, wherein said at least one mutation comprises two or more mutations in at least two of said loops comprise the mutations.

3. The bacteriophage of claim 1, wherein, prior to taking into account said one or more mutations, said bacteriophage comprises a wild-type protein sequence of SEQ ID NO: 227 or SEQ ID NO: 228.

4. The bacteriophage of claim 1, wherein said the bacteriophage is capable of infecting Klebsiella.

5. The bacteriophage of claim 1, having a genomic sequence comprising a nucleotide sequence at least 99% identical to a sequence selected from the group consisting of SEQ ID NOS: 229 to 255.

6. The bacteriophage of claim 5, wherein said sequence is SEQ ID NO: 230 or SEQ ID NO: 231.

7. A phage library comprising a plurality of bacteriophages according to claim 1.

8. The phage library of claim 7, further comprising at least a second phage of wild-type Φ100 stock with genomic DNA comprising a sequence at least 99% identical to SEQ ID NO: 3.

9. A phage library comprising:
at least one phage comprising a genomic sequence comprising a nucleotide sequence at least 99% identical to a sequence selected from the group consisting of SEQ ID NOS: 229 to 255.

10. The phage library of claim 9, further comprising at least a second phage of wild-type Φ100 stock with genomic DNA comprising a sequence at least 99% identical to SEQ ID NO: 3.

11. A nucleic acid comprising:
a sequence encoding at least a portion of the C-terminal-most 200 amino acid residues of a phage tail protein sequence,
wherein said at least a portion comprises at least one mutation in a region selected from the group consisting of the BC loop, the EF loop, FG1 loop, and the FG2 loop,
wherein the at least one mutation comprises a protein sequence selected from the group consisting of SEQ ID NOs: 19 to 88 in the BC loop, SEQ ID NOs: 90 to 123 in the EF loop, SEQ ID NOs: 125 to 175 in the FG1 loop, and SEQ ID NOs: 177 to 225 in the FG2 loop.

12. A phage comprising:
a protein sequence encoded by any one of SEQ ID NOs: 229 to 255 and variations thereof that encompass sequences of 99% or better identity.

13. A method of preparing a synthetic bacteriophage library, the method comprising:
providing a selection of bacteriophage sequences;
using gradient-boosting machine learning and structure prediction modeling to identify a likely receptor binding domain in the selection;
introducing random mutations in the likely receptor binding domain to produce modified phage sequences; and
recombining the modified phage sequences into phage genomes to develop diverse synthetic phages.

14. The method of claim 13, further comprising testing said synthetic phages against suitable bacteria to identify phages active against desired targets, wherein the desired targets comprise drug-resistant and/or phage-resistant bacteria.

15. The method of claim 13, wherein said diverse synthetic phages are effective to kill Klebsiella.

16. The method of claim 14, wherein said diverse synthetic phages are effective to kill Klebsiella.

The application's sequence listing, which the Patent Office published only in electronic form, follows.

SEQUENCE LISTING (255 sequences)

SEQ ID NO: 1 - DNA, 49701 bp, Klebsiella phage
  source 1..49701: mol_type = genomic DNA
tgtatgcaccatgcacgcaatttgccgatcgaagccagcaaaagcgccaggtgtttttcgccaacatttacgtcgtgtggaaatgtgggggaggaataatcttacctaaaaattgcgcaaaaagtgaccaacataagcctataatagatatataagtatatgataaataataatattattattattactctttatctatatatatgtttggtaagatttcttcggggaggttatggattcctcttgcgcaagccatagtttttagatgttccgccgcgaaaaaatgtatatagggatatataggggatgacagcaaatcttaccaaacacgcttaaacccttttacggcaaggcttgcgggtggtaagatgacattcccacacaagcaaaaacgacgtaaatgttggagaaaaacacatgcaatataaaggctatgagttcgaagaagtcgacgtgtccgagtggatgcagtacgacgcagataagcaggcagcttaccatgaatggctgcaatccatcacgtttggcggctcaccaggggtagacgatcggccagttgctgaaaagtcacccgccgcattcactggtaatcgttcgtccgagatccggcgcatgttcctggatggcgggcgacgtatccagatgacggcggaggagttcgcggataagttcggcgttcatccggtcgacaaccatttccgcaggccgttgctgaaactcctggagccgggagaagtgttgcgggtgagcctgggggcggggttgatctccgtctttaccgagttcgacgcaatgactggctcaaacatggaggctgaggcatacaggcggcagggcgctatctccgagagggaaaggattaagggtttagtggccgctcttgctgtagactttgccggacatgccctggccgggatttacaaggcgaacttgttcgcggctatcgatcttggattgaccgccagcgatatcagccaggaagcggccaccacgcaatagcactttttgttaaaacccggtcagagcgatcgggtattgtctttccatcgacaacgaaccgaggaaaacgaaatggtcactcttatcacatgggaacacgaaaacagcgagccagtggtgcgcgaattcgagaccgtagcggcatgttacaacctggcggcaaatggtggcttttacaaggcgcagatcgttaacgagttcggggttgttgattatgaattttaaggcgagcgacgtaaaacctggcgtggtctacggatcgcgcctcaataaccgcctttggcggtgggacggcgaaactatgtggactaaaggcgagggcgatgttatctggcatgaatgcggctggccataccccaccatgagccgcctcgatatcgcttattatctttcggttggcgatatgcacgagatggaagatagcactttttgctaaaacactgctgtcgagatccggtattatttattcatcgacaacaaagaggagatgaaaatgagcaagaagaatccatattcaaccagcaactaccataacgaacacgtcatgcgctggcactggcagaaactcaaagaacgccaccttgcacgccatggcaaataatcacaatagcgccgcttcggtggcgctgtatcccaaccataaaaacggcttacaccaggaggattggccatgccacgattttcagcaacaacaaaacttcgcaccttcgccgggatgccgatcccatactcatcaaccaaagccgtccagggcagcgagcacggcgtatacttccactggtgcggcaagtggcgcttcaccgtcattcgcggcttttacgtgacctgcgaccacgtggatattaccgactattccggcggaaaccaggttcatgagttcaataggcacgaatagcactttttgctaaaactcgatcggggcaatgcgttattattaccccatcgaaacagaggagcaaaaaacatgattggcaaccacaacaacgaactgaacgcagcagcccaccgtcgcgccgtcgagcagaacttcaacgcgcttaaagtagcctgcgatgagatgaaagcaatgcttgaactgccgtcatgggatccccaactcgaagactattacgacggcctccgcgtcaagcgtgacgatatcatcaaccgcctgcgcctggctggaatgtttctgtaaggagaacgcaatgattcacgaaattaagtctggaaaacaagtagtggccaccatcacgcagcgccacgttgtagcatttcagtttaacatccccggcaccaacgatatgcagtctcttgacgtgccagtttgggctaacacgatcgccattgatgccgacggctcgatttgggcctacgagtcgaccgccgaggatgtttgcatcccggactactcgcgcaaagcctgggtggattgtgggccttccgaaaacaagatgcggtcagtaggggagatggatcgcttccatgattgggcagaatcgaagattgaccttcgcggcctgaaatagcacgcattgctaaacgcccggtcaagggatcgggcataatcatcacgaagtctattaacaaaccgattatgcaaggagacagaagaatgcaacaatttgaatctcgcggcaagacatacaacctgccggacactgctacccatgccgcccctggtgcgtgcggcggcctgtattttaaggatggcgatagttggtttttcatgggggatgtggttgggggtgtaccgacgaagacaggcagcttactcgtgggcttctacgatcacgacttggtggagttgaagccaaagcgcgtaccgttcgctttctggaaaaaaatcaaaggggcgatctttaaatgaatcaattcgaattcctggcgcgtgcgcaccgtgcgcttgcaatgtacgccttcagcaagaacatgaagattatcagtgttgaggttgagttcaacaatatcagcatttccggctacgttggcgactcataccacgtgacgaaattcagcttcccatcgctggcttgcctggagcgtgaggcattcggtttctgaatagcactttttgctaaatgcccggtcagcagatcgggcataatggccacacaccaaacaacggagattcaccatgattcgcactaccagaccactacccaataacctttacgccacgattggggttcgcgcggtgagacttattcacatcaacgaagttggcaacgtggctattttgtggtttaagcgccactcaagcggtgttggcctgagcattcaaagattcgggcgctttaacggcaactcccaaacccattctcattgggttgatggctcatactgctggacgcacgttaagcacgtcgagaacttcgacgccaaatcactgagcgacgacgacgcctggaagatggtaacagacctcttcggttatgatgcctgcatggaggtagttggatgatacgtttatcagacttcgatcgccactgcttaaccgggcaatttggcgaaaagccagtaatgtgcaagatctcgaaggtaaaaggcgaccccgtcgagcaggtcaatacgcttaaaggcctggcaatgcgcaaccgactttacatccatgtgcgcggcagactgttcgcacagcaggttcatttttcgcatgggacgtggttctacactggcggggacggggttggcccatcgcagaaaagggttatgctgcgcgagataatcgaacacggttacgtttggactaacgggatctactaatggaaacggtaaaagtaatttgcacgcacgctggctattcgccgctatccacctatttcacgcctggccgcgagtatgacgccatgttcggccccggccttgatgaagtgtggattttgcaggacgaccagaacaccacggaagacgaagaattttggccagcctgccgcatgccggacgaaaagatcgccatgtacgccaataggccatacgaaaacaacgttttgtttgaggtgaaagtatgaaagtaagcaaaaagaaactcgcgctgtattgggccttcttcctggctggccttgccctgcataacagcgtgggctggcagacgatcggaatgctgtgcatgattattggtgtatgccgactgtctgagattaacgggttccgccgtggatatcgggcagcattcagcggcgaaaaagaatagcactttttgttaaaactgccgtaacgtcatttgataaagtggcgttactgaagtgaaacaatccaatcaggagcaacgcaatgaacgataatttaatcgcactgctggaagaactgaattcctacggctgtgcatacatcgagctttctagcgaacacgttatcgaagtcattattgacgatgacgcagggttcaccaagttaagggtggctaccggggccgaagaggaattcgaagactgcggcatccgtgaagtaaccaaccttctcgaagttcaccaggtgaaggagatccgctaatgaaaaccgtcaaactaatggttgtcaatgcggcccgcgaacgtgaacgccaccttatcggctgcgtattcgatgccgtcgaggtaaaagactcaaaaggagactttcacgtaatacagggcggataccttaacgaatttatcgtcaatccgctggatactgacgaagatttgaccatccgtgttggtagcgagccggaaaacgcgcttttccacctgcgtaaagtatcgaaggcatcgcagcgcaagttgctggttcgcgcactgaagcgcatagcgaagcagcgcggctacaccgatgcatacatccgcaagttcggcacgttcgctggagtaggtgattgggcgcggtcatgggccgacttttatttcaacaaatccggcgaattttgttcagcgcatacggactggctgcatggcacggaacacgatccagttaacggccacgagtggtacgaattcattgaggcggaattagacgccctttgatagcacgaattgctaaaacgaacgtccggggatggtgcatactatccccacactaacgaacaaaggaaattacccatgaacaaaccaaaaatcatcctgatcccgtccgtcgattccgtggttaatacttatgctaaattcaccaaaggcaagcgctataccgcaaccgcatttaccaaatgttccggcgaaatgctgtacaaggtcagcgatgactacgggcgcgagtatcacgtaaacccaagatcttcgcactatcttggtggccatcgcttcgatattgagtacccgatcgaagattgcagtaagcgcgactcgttcacctacgatgacagccgttctatcgccattcgcgctgcaaccatcggggacgggtttattagccgggcctgcatcgttgatctgatcccgtccgataatcacgccaaagacgacgccgacacgctgttaaatgccgtcgttcgcgccggaatcggcttggagttaagtgatgcgtcgtgcgaatcattcatgcgtgaaccgttctcacgaatcgcggagcttgaaaagcaagttgcgttcctgactggtgaacttcaggccgcaaacagcaagatcgagaatgttcgcaaaatcatgcgtagcaagcctggccatgacattgaagattacgcgcgggttttgcgcatgatggccgacgcattcgccaaactttagcagtagcacgaattgctaaaacagatcaggggtaagctggtatagttaccccatcgaaacgaaacggagttacagcaatgaaaatcaaaatcaccaaaatcaacactcttaacggcgacggctcaattaccctggaagaatgcggcctcaaaatcggcgaagttcttgaggtcgacggccacttcaacgacggctcatactgtgtgatcgctccgcgcaatagcgagtttatccaggctggtgacaatatcagcgtaagcgcagacgaatgcgaggttgtggaagaatgagcaacaaatttgggtactgacttacaccattggaaccaacgaggggcgcaaatcgcgccgcctcatctgcgacaccaaagagcgggcgattaggcagcaaaccgttcttggtggcgaacttgtcgagtatctccgcaagcctgaagcgttcaaggtgaactggccggaaggcatggatatcaacggcgctttagcgagcctgcgtgaattgcagaacaacccgaagacgtggagcgactttcaatgcctgcgggcggagccggaagtgaaggccgaccagttcaccaatgttcggtcgcagcacgcggagtggtcggatcgccagttcggcgacgttgggccagtcgggccgctcaaacacctggcgaaagaggcgatcgaggccgccgaagcgccggatgacattagcgagttcgctgatatcctcatgctggtatgggacgcaacgcgccgcgccggattcagcgatgagcagttggctgaagcggtggcggaaaagctggaacggaacaagcgccgggcgtggggcgaggtcaaagatggcgagccttgccaccacgtaaaaaattaacgaaatcgaatgccgtttaaagcgcctgtaagccattctggctggcgcaaatttaaggagtacgattgtatgcctgaatactcgaaagtcgaagatatgccgattggtgcaacaattactggtatccgcatgagcgagtcggacgacgccatcaagccgctggcgttcccggttacgcaggtggagacggacagcagaaaagggttcatcttcatctacaaaaatttcaatagtccgctgcgggttgaagtattcatcgctcgcggaacctgggtagaatgggagaaggccaaatgttcggactgaatgaagcgcagtacaacgccgtaaagcgcatagcaaagcagatggccgcagaaacaaaagacgccatcaagaaggacaagaagacctacgatcaggtcgccgcgaagatgatcgataaacattgggcgcaaatcaacacgctggttactcgcggccagtttatatggatagctggctacctggaaggccgattcggtcgaagggatggcgagtatgaataaaaaacagccaaacgattcagtgacctattgacgcaatcgcgctgatcgggtaacgtgaaccatgtagacacaagaggcggtaaacatccgcaagcctggccccggttaggggcgtttacataggagttatgatgcaatataaaatcatgctcacagcaagaaaaatgggtggcttttgcaaatcctgcattcaagagttcagcatgactattgaggcgaacgacaccgccgacgcggtagagaaagcaaaaaagcaatccggcgtaaatctggatacgcataaaatcaacatcaactacataagggaaatcagatgatgctaactgtgattattgctcttttaatgctttttataggttatcacgtcggagcggctcaccttgtagagcgactttcaaagcgggtacatgaaggcacctttgctgccatgatgtacaataagaaaacggcacgttgggaaaaaattggcgatccggatggtatcgcaaaacgaattgctttttcgccgcttccgtatgttgactgtgagctatttgtgaaactacagaagacgctgaatcggcgaaacaaactgatatgacaaaagaacccgcttcggcgggtttttttatgcccgcgatctgatatactcgcaaatcaacacagaaggaggattacaaatgtctgaagaacgtagaaaacgcgtaacgaaatcgcactttgcaggcaactttaaagcgctatatgaaaaggagttcggcgtggtgctagggcgcacggcagagatgacgccggaacaattttttgatatcgcaaagcgttacttccagtgggccgaagataacgcaatcaaggctgcggagacggcaacgtttcagggcgacgttaacgagtggggagtgaacaagcctcgaatttttacgctaacagggttaagcctgttttgcggcgtgaaccagtcaacgcttacacgctatcgccacgatcctaactatgctcccgtcatggagttcatcgactccgtgatctatgagcagaaatttcagcttgctgccgtcggcatgattaacgcttctttcgtcggaaaagagatggggatcgataagccaccagtgctgaacatcgacgctatcgccggggataagaacgagatcaccgaagagaggttagagaaggcagtgaccaatattcttgataagctgtaagggtcagatatgaacgaaatgatcatttgggaagacctgtcgccagccgataagctggcaattaaggcgcttagtacgcgcaacttttcgctattcatgaagatctggtttcagatcatccagggagaaaagctgatgtggaactggcatcactcctacttttgccacacggttgatgaaattatcgccgggaagcgcaagagcacgatcgttaacgttgcgccaggctccacaaagacggaggcgttctcaatccacctcgcgccgtatgcgtatcttaaatgccggaaggttcgaaaccttcagatctcgcagggtgacgcgctgtcaaaaggcaactccgatcgcgtgattaagatcttctcatctaacgagtggcaggagctatggccatcaaagttcgggcgcaagcagatcgatgaatttcaggtcatggacgataacgaccgcgtaaggctggaaatggtctcccgttcgtccggcggtcagatcgtcggtaagcgtggcgggtacatgacgccaggtttcagcggccttatcgcgctggatgatatcgacaaaccggatgatatgttctcgaaggtgaagcgtgagaaaaaccacgtactcctgaagaacaccattcgatcccgtcgagcgaagaagaagaaaggagacgaaacgccgatcctttccgtgcagcagcgattgcacgcgcaggattccacctggttcatgatgagcggcggcatggccatcgacttcgatcggattgttatcccggcgatggtaacgcgggaatatggcgaatcactccctgactggttgcgacctgagttcgagcgcgacgtgctttccggcccgtcggtggtaattgacggcgtggaatactggtcattttgggaggaaaacgaatcgatcgagaacctggttgcgctacgcgaagccgatctttatacgttcctttcgcagtatcagcaggaaccgatcgccctgggtggcaacgtgttcaagtcggagtggtggcgctattacggcgattccgacaaggcgcacgagccgcgcccggacaagttcgaatatacgttcatcacggcggacaccgcgcagaaggtcaaggagctaaacgactactctgtaatgtgctattggggcaagtatcgggatcgcgtctacttcattgacggaattcgcggaaaatgggaagcgccagatctccgcgttcaggccgaagcattcatcaagcagtgctggcgtcggaacaaggagtgcggaaaccttcgccggatctacatcgaagacaaggcgagcggtacaggtctaatccaggatttaacgaaggcggtaaacggcatgggcgagatcgtcccggtgcagcgcgataaagataaggtcactcgcgctatggatgcacaaccaatcatcaagggtgggcgtgtcgtgctgccggacaatcacccattcgttgcagagcttgaggcggagatgagcgcgtttacatatgacgattctcatccacacgatgatatttgcgacaacgtgtttgacgccgcaaacctggaaatgaacctgagcgacgatccggtagagcgaatgaaacgccttgcgggattgaaaaagctgggtcgctaatacataatgtgggcctgacggcccacacttaaacaaggttgaaatatgaataacattaagatggacgactataatcaaatctttaatggtggcgctggttatgcgtcaaccctcgcgtctatcgcggcaagatttggaacaatgtcgcaggttgaagagttctatcatgaaaacggcatggcgaagaaaatcgttgacgtgatcccggaagagatggtcgctcccggcttccagctaaacggcatttcagataacaccaagtttcaatctgaatgggacgggttaaatctggagccgcaaatcaccgatgctctttgctgggctaggctgtatggtggctcctacgtcctggcgatggttaacgatggtcgcgcattgacttcggcagcgaagcggggtaagccactcgaatctatcgttgtttacgaccatgattccgtttccgtcgcagaggaggaaaccagtccgcgaagcccacgattcggaaagcctaaaatgtacgaggtgaagccgctaaacggcgggcaaccgttcaaggtgcattatacccgtatgcactacatcgacggcgagcgcgtaaccaacaaggtgcgcaagctaaataatggcgctggtggctcggtgctgaacaagtcgattattgaagcgattcttgattacgactattcggaatatctggcgacgcaactactgaagcgcaagcagcagggcgtttggaaggcgaaaggcctggcgctaatctgcgacgacaaagaaggcgagtacgccgcccggttgcgcatggcgcaggttgatgctaattccggcgtcggaaacacgatcggtattgatgcggacgacgaagagtacaccgttatcaactccgatatttcaggcatcccggaattcctttccgcgaaaatggatcggattgtcgccctgtcaggcattcacgagatcgtgctaaaaaacaaaaacactggtggcgtaagtgcaagccagaacacggcgctacagacgttctacaaactggttgaccgcaagcgcaatgacgattacaagccgctgttagaattcctgttacagttcatcgtaacggaggatgaatacagcgtcgagttcgaaccgttgtcgctgcctaccgatgcggagaaagcggatatcttccagaagaacgccaacgcggctcgcagcctcgttaccgaccaggttattgacgccaacgaagcgcgtgatactctgtcggcgttgattcctgaactgaagctaaaaggcaacgctccgaagcagaaaaaacttccggatcgcgccgctggttcaggcagcacgcaaagcgcagagatcttaaacaacacggaggcggatgatgaaagttaacggcagaatcccaaactggcgttatcctgaagcaagcgagcgggagttatcccgctcaatgcaggacgcggtgacagaactcgtggtagaaatgcgggatcgcttagaccgccttaaatttgacgccacggctgaggaaatcagccaggcggaagacgatatcagcgaatctgccatcgtgttcttttccgccgtaattgcggcgctttcctccattgggttgactatctatagattcaattctaaacagtggcttgcaattgcgatcgcggctggcgggcggaacaacgaatcagttatgcgccttaaagaattcggtgctggtgggtatgaagactggtatcaggaatcgctaaataagtggcaggattacgccgaagcgtcaatcaggaagttagcaagcgatatagttgctgactggacaacgaaagttagaaccgccaacaacattggcaagtctcgcaagcagatcgatgaaatcatcgaaggtcgatacgctatctatggtagttggtcgcgcaaccgggcaagcggaatcatcggaacttttaacagtatgttgatgatgcagcgcctaaaagatgctaaagtatcgcattacttttggttcgggatgatggacgaccgcgagcgcgagagccatatcaagctagaaggtaagcgacgccccgttaatggtgacggaatcttccccggcgaagaatacggttgcaggtgctgggcggttccgtcatttgataatgaggatgattgatggttaactttaatgattactttaatcacgtaggaaaggatctgatatggaagcgagcaacatcaaaccgcgtaaaagttggtgatgttgccgggtggaaagatgagcatgggtatgtatacattagattcatgggcaaactgcgacaagctcaccggatcatttgggaaatgcaccacggcccaataccagaaggaatggaaatcgatcatattaaccatgtaacggacgataacaggatcgagaatttaaggcttgtaaccagaaaggaaaactgtaaaaacgtatcaatgagcgtaacaaataagagtggagttgtaggcgtgagttggtgcaagagaacaggtaaatggtttgcatccataagggttgataaaaaagagcgattcttaggtagatacgaagacaaaaacgaagccatttcagcaagaaaggcggcagaggcaaaatacaatttccataaaaatcacggagataaaaaatgaaaagagttcaaaggttcgacacggtaaagatgaaggccagattcgatgagaacggctttctggttgatactccgatcgtggcgcgtatcggtgcgcagacgtaccagacgccaaccgggcagcgcgtcgagttccgcccgcgttcggaggtgttcgatgctgaatcgctggcttcataccagggcaagccgatcactttgggtcacaagatggtgaacgcgcagaacgcaaaaggccttgtcgttggctcgtgctccggcgctggcaaagaagatgggattggtgttcttgttccggtgatgatttacgacggcgagtcaatcgagcaagccaaaaagcgcgtagctgctgagttatcagtgggctacacttcggtcgatatcgatcgcaaaggttggggtaataacgcaactggcgaatattatttcgatgaagaccttccggaaaacttcgaagagatgaaaaatgattccgtctctgattgggttcgctttgatgcagtgcagacgaagattcgcgtgaaccacgtagcgctcgttttccgtgggcgtgccgggattgcgaaattaaatcttgatagcgaacaagaattcccctatgatgacgactcaaaccacaaaggagctaaaacaatgatcattaaaattgacggcgtagatgttgaagtagcagataacgttggcgcttacattgcaaaactcgacgcgcaagttgcatcggcaaccagtcaggtaacgagcatcaccgcagagcgtgacgcacttcagaccaaagttgatggcattgaagatgaagtcgccgcccgcgttgctaaaatcaaagccgacgaagacgcaaagcagaaagttatcgcggttgtttctgccgctggcgtcaagtgtgacggcctggatgttaaggcaatgaaagttgcttacatcaaagaggttgacggtcgtgatctgtctgataaagaagattcgtacatcgacgcttcttttgactttatcgccaactctgataagatggctggcaatcgctccaaagtcttcggcaaaaaagaagatggcgagcaaaaagacaaaggcggcttaccgaaacttgacggcaccgaaatcatcgatccgcaggcaaaattccgccgctaataatttgcggccttcgggccgctaccagaccaaataaacaggagattcaaaatggcacagattccagcttcttattcccgcaagcgtgatattgccgtagcggggcagatcgctgatacgtcgctttataatatcgacggcacttgcgttgctgaaggcgatatcaaggctggcgtactggtggcttccactggcgtagtttccaatggccataaggtcgttaagccagcgaaagcagcgagcgacgtcattgtaggcatcgcgcagttctcgcaagcctactcgcctgaaggcaagtatgacgatgagagcgcggttaacgttatgactcatggccgcatttgggcgatcgcggacgcaactgttactgaagcagattgcgtgtttgattctttcgccacctttaccgcaaacggcaccgtagcgaagggtgatgccggggttatcaaaactggctacaaacacactggcgaatacaccaagaacgcagatggcaccgttctggtgaaagtgcaggtgcttcagggcgccgttgctccagcggctgcaactggcggcgctggcgtataaaataaggggcttcggccccatttttgcaccagaaaaaaacctttgacggcttaacgattcgtgatattcttcatctcgttaagccaaatacacaaacaggagtttttcagatgactatgaaattagatgcattcgaacagagtgcaattaaggtcgcaatgcagggcatgggcgtcgatgccgcaaaactggatgcttacggtatctggactgttaagcagatgactcaattactgaatcgccagtatgagcaggcatacccgcagaccagcgcacttgagcttttcccggtaactaccgagatctcgccgaccgcccgccgctttgagtggctcgaattcgacggcgtaacctctgcgaaaatcatcgccgattacaccgacgatctgccgaccgttgaagcgatggcaaaagagaagtcagggaaagttttccgcctgggtaacgcgtggtttatttccatcgacgaaattaaaactggtgcagcgctgggttcaagcctgagcgatcgaaaagcaaccctggcccgcgaaggtcatgagacgctcgtaaacgatctggtgttcaaaggctccactcctcacggtatcgtgagcattttcgaccagccgaacattaaccgcatgaccgccagtgctgcatggggcaatgattcagcggcggctgaaaaggcattcgaagatctggaagacctgcttaacatgatcgaagaaaccacgctgggccgccatcacgcgaccaacatcgtgattcctccgtctaagcgtcgtcttctgacgaaaaagatgccggacactagcggcgactcttatctgacttggttcaccaagaaccacccgaacatcaccattacggcgatggcggagttggaagatattgacggcgcaggcaccaaaggcgtgctggcatacgaaaaagacccaatgaacatgagcatcgagatccctgagcggttcaacatgctgccgatgcagccgaaagacctgcatttcaaagttccgtgcacctccaaatgcactggtctcatcgtgtaccgcccgctgactattgcgattctcaccgggatttaatcaaaagcgccttcgggcgcttttttattgcattgcattctgcaatgtgctttaatttgaaacctaaagtaaaccaatggagcattaacaatggccagtaaaaaagaaaccgtagaaaccgtagaaaccgcagaaatcaccagcgaagaacagacgccgcaggttgttcaactgcaaaacgttggtgcatgtgcaattcgctataaaggcacaaattacgtctatgagcaggttttcgaagtgccagaaagcgagatcgaccgattccgccacgaaatcttcaaaggccgcgtcgagttctacgacaatcctaaacgcacgcgcgaatacatcgcagcggtaaaggcgacagcgaaagagatcgtgcagcctaaaagcgcggaataacaaaaaccaacaaagggcgcttcggcgtcctttttcatatcaggagagcaaccatgaattacacaattcaagatgtgatcgataaaatgcgcagccttgcacctccgcttaaagaagttccagatgaactgctgtctgcatgggttgtgcttgccgaagaattcgtttgcaaatcccggttcggagactccatcgttacggcgatcgcgttgatgaccatgcatctaatgtttttggacggcgcaatgaagcaggaaggcgaaagcctggaatcttacacgcagcgagtggcgtcgttcaccctgaccggggagttttcccaaaccttcgatcgcgtgtcggcgtcaagtgataacgaaatgctttctacgccgtggggcaaaatgtactggcgtatgctcaagatgcgcggcggcggcttcggcctgcttaccgccgggaacgtgcgccgctgcggaatggttaggtgatcgctatgaactacaaagcaatccaggcacgcgcaagcgctggcattaaattcttcagcgacgctggcggcgtgttcaacaagtacacgaaaggcgctggcggaggaatcgatccggaaaccggggaagatatcattcctggcgaggtggtgacgacaatcaagggagcgatcagggatgttaatgaccgtgacattaacggcgaaaccatccttgctggcgataagcgcggttttttcactcatgatgtgccaatcatggaaggtgacgaaatcgaagtagacggagagcgctaccgcgtggttaatgcccgcccggtaaaaccaacgggaaccgtcgttgcctaccgtccagttttgcgcagggtggcgacttatggctaattacactatccgcgaattcacaggcgcaattgatgcgtggtgtaaggccgctggtgatgcgctggaggacgttgtaaggtttacgtgtgaagatattcaccgcgaccttgtaatgcgttctccggttgatacagggcgcttccgtggtaactggcaaatcacctttaaccgcgccccgctttacgcgattaacgcatacgaccaaactggcgaaaagacaatccagaacggcaaagccaacattgcactatacgcaaaaggggccgggatcacttcgatctggttcagtaacatgctaatctatgcgaacgcgctggaatacggccattcaaagcaggctcccaatggcgttatgggcgttgttgcgatccggttgggcgtttatgttactgaggcaatcaagcgagcgagggcgaaaaatgcattatgatatggcgttaaaatgcaaggcggcagtggctaaatttgccgccgagaacgggttgagggtcgcgggggataacgttgactttatcccaccgagaggcggggaaacctaccttaaagtctcctacgtcgaggcggattcaagatcggttgacctgtcaaggaaatgccgagtctatctggcgatggttcagattgacgttatctttaagcctggaatcggaaccgatcgagcgaggattatcgcccaacgcgttgcaaaatccttccctgaaggaaagattgttgatcgtgacggtaagttatatgtgagcgagtgggcggaggtacacggcgtgcagaagcacgaaacgggttggttcttcccggttcggttcacagtaagatgcgaccgcacggaggagagcggctatccatccaactagcggaacctcacgtcgcttataatttcttgccagcctggaaatatgtaggcataatggcggtgtaaaactttcattcaaacaggagtattcaacatgcatttaccaaacggtgctaaggtcttctttgagaaggctcgcggtgcgaagattccgtttaccgcaatgaccaacgacgcgaaaaacccaaaaatcacggtggcagatggcaagctgaaggtgaaagatattgtgatcttcaccgattgcacctgggacgacttcgttaacaaggtggctcgcgtaaaagcagtgacagcaggcgtggcaacgctggaagagttcgacacctccgacactaacaagtatcctggcggcgcggctactggtaacgtaagcgtgatcactgattgggtggaattgccttgcattcaggatttaggcaaagatggcaacgaacagcagttctataactatcagtgcttgagcgatgagcgcgaacaatccgaacctacttacaagtcggcagtgacgcttaactacacgtttgcgcacgattacagtaacgcgatctaccctgtgttgcgttcagccgacgccagcaagcaggcgagagcgatgtacatgtatatcccgcgagcttccgaggttcgttactggtctggaattgcatctttcgatgacattccttccacggctgttaacgagatggaaacggtaacgcttaacattgcgcttaaaggtgctcacgtcttccttccggttgccgtgtaattaaatggcggggcttgtgcctcgcctttttttgtgcataatagcgaataacacaaaccaatcaggagttaacaaaatggctaaattcaaaattcaaatcggcggcaatctcccttctttcaagctgcctgtaaccttcacttgccccgacggcaaagaagcaaccatcaccatgacagtaaaacatcgttcaaccgatgagatgaaagacttttatgagagcgaagataaagcgccaaagggtaacgccgagtttatccgcttcatggctgaaggttgggatctggatgacgaattcagcgatgaaaacatttcctggctttgcgctcacttcccggcgttcgtcatggcactgccacaaacttacatggccgcgctggcgggccaccgtgcaaaagtttaaggcgggctgtttatctcacgcttcagcctgagctaaccgatcgccagcttgcggagtacgggttaaggcgatcggattatgaagcagatcttgaaacgatctactttgatgaacagaccgcccaaagctggcagctattccaggccatgcaaacgcagtggcgaatcgggatgaatggcccgacggggcttgactataatacgttgcctatgctgttcgaattgtataaaatcgacaatcgagaagcggcattacttgacttgcaaatccttgagggtgaatacctgaaggagatttacaagaaatccaaataagcgcctactggcgcttttttcatatgggggcgaaacatggctgataaagtagctgggctaacgtttggcgttgacgtgtcgcaggttgataaagcggtacgatcactcgcagaactgaaaaaccaaagccagcaaacgggcgctggcctacagtcacttgctgacgctgaaaggcgggccacggcgcagaccgaggaaatgaaccgcgcattgcagcgccagaagcaagagactgacaaatcaaaaaccagctttagcaggatcgcaagcgccatcgatcccacgatcacaaaaatggccaacttgcgcaaagcgacggaagaacttgataaagcgtgggcgcttgggcttgttcctgacaaggaatttttccgcctgggagccatcattgaatccacaaccaacaatctacggcggcagcaggcggcgctaaccgaagaaggtcgcgcagcaatcgcagaggcggaggcaaagcagaaggcggcaaatgccgggcgtgattttgtcgccagcctgaaacagcaggctgactccatcggaaaaacacgcgccgaactgctggaaatgaaggcggcgcaattgggcgtatcggcagaagcggccccgttcattaacgcgctgaaacagcaagagcaggcgttaaagaaacagcaaaacgctatgggcctggctggcatttctgccgggcaatataaaatggccatgcgccagttaccgatgcagatcacggatattgtaacttcccttgcgtcaggtatgccagtctggctggttgcggtgcagcagggcgggcaaatcaaggacagcttcggaggcttgagcaatacgtttaaggtgttgttgagctacatcaacccgctaacggttggtgctgcgtcgttgggtatcgccctggcggcaatcgctaaagctggttatgactcctggagtgcgcaacgagaactggcgaatgcgctggtgctgactggtggctatgctgcgaccacaaccgggcagatcacagccttaaccgaagagattaacaaaaactcatcggccacgattggcagcattcaggaaatcgcaacatcgctcgccagttctggtaagtacaccatcaaccagattaagcagatcacgaagactacggcggaatggtcggcgcagacgggggagagcgagaagacgatcacagggtattttgatgccatcgtaaaagaccctgttaaggggcttgccgatctcaatgagcgttttaattttctgaaagagggccagctaacctacatcgaatctttgcgtaaaacaaaaggcgagacggcagcagcagatgcggcgacaaaactgtttgctgatactatggataagcgccttaaagatatcgcggacagtgcaacgccactcgaaacgatgtggatggatattaaaaaatgggcggctgactcgtggaagtgggtaggcgatcacacggtaggggcgctaaaccttatcgttgacacggtttccgcaatcatcaacacgatcagaaagctgattgccgacggcgacgccatgatcgcgcagttcatcgttgacgctggccgacagctacagaagatccccggcatgggagactttgggaatgactttctggcgcagcaggagcagttaatcaaggactcgaaagccaaatccgccgagcttgcaaaaaccattgcggaacagcaggcaaggatcgcaaaaggcgagatgggttacattgacgccgcgaaggataaaaccctttccggtgggtacagcagcaaaacgaaggatcgcgtaaatcaggaagaaaaagatatcctgaaaaaccgcaacgccaggaagcagcaggtagacgcgggcgttaaaattgatgagcagtatcaggctgaactgctatcgctacaggcgcagttaaaggttttgcagcagcacaaagggcttgatgacaagatcagccagcagcgcaaagactacttcgagacggttgctaaattccaggttttggaagaggcaagccagaagcgaaaactgacccaaagcgaacagcagatgctggcgaacaaaaagaatatcctgtacatggcggagcaaaaggccatcgtgggagatcagattgttcagcagcagagattgaacgccttgcttgacaagtcgaccaagtatcaaaaccagatggcggagaaaaccaaagcgctacaggataccgccggaatgggtagcaaggagcaggagagataccgggccaatgcgcaaatggcggctgactggaaaaacaacggcggatctttaagtgaccctggatttaaagcgatgcaggccgcaagcgataaattctacgcacagcaagatgcgcaaatgatgaactggaaggccgggttcactcatgcgtgggctgatattggcgacgaagttaatgacgtatacaccaacatcggggatatcactaaaaacacatttaacggcatggcgagcgtgctgactgattttgtaatgactggtaaagccagctttagcgactttgcaaagagcgtgatcactgacattaccaacatgcttatcaagatggcgctgtttaactcgctttctgccgcgtttggtggtggcggcacgttcagcttcgccaacatgttcagcaagggattttctggtggtggctacactggcgacggcgggaagtatgaaccaaaaggcgttgttcacggcggggaattcgtattcacgaaggaggctacgcaaaggttaggcccggaaaacctgtaccgactcatgcgcggctatgcaagtggcggcctggttggtggtaacgcaagttccggatctggaatcaccaacggcggcaacgtcgcagcgtcggcggctatggtgttcactatcggtgacattaacattacgatgggttccggtcaggatagtaaggggatggagcagggcgtaaggcagatcgtgaacgatatgttcaccgaggctttgagccaaaacgggcgcattgcgaagttcgtcaatgagaaaacgagggggtagtagtggattcctttaaatggtgtacacaaattcaaggaggggcggcaaaggtagccgtctccaacaacattcgatcgatcagtttcggaaacggctatatccaaacggcgtcgagcggcattaacaccaagcgccggacggttccgatcgtttatggcggttcagattgggaggaggtttataacttctgtcaggatcacgtaaccaagccgtttgtgtggaaggcacctgatggaagaatgggcgtattcgtcgtaactgccgactccgttaaccttgcgccgcatggtggcggcgtgtttgaggtaactgcggagttcgccgaacgcttcacttcagccggataatcaaaagcgccctttacgggtgcttttttttggcctatgatctggagtcaattagaggagggcttacgatgacagccaacatttcaaaagagtttacgaactgcttacaaaaacttttccccggcgagatcctgacgctgatcgatatcgacgccacaaagttcggcgggcaggtctaccgattccataacgagaacgtcgcctatacaaccgaggagcttttagcggcggtgaacggcgggacgcttcagccaaaaatgatcacgtttcgcggcgagcaatacggcccgcgcccgttcggcctgggcgggatcgcaatgtcgagcgatggcacagtggaaaagccaacgttgacggttagcaatattgatgcgcaggcgagtgctcttattcgcgcctacaacggcctcatgcaagccaaagttacggtatgggttttggtcaatgaattgctgcaaaacgacggcagtgttaaagagggcgattttaggcgatttgtttactacatcgagcgaccaaagcaagtagacccgcaaaaggcaacgttcgaattaacatccgtgtttgatatggacggattgatgatcccggcccgactgacgcaaaccgtttgctattgggcgcagcgcggctggtataaatccggcaagggctgcgactacaacgggcagaacggatacttcgacaagttaggaaacagggttgacgacccgtcgcgggatgtttgcggtggcctggtgtcttcttgcaggcttcgttttggcaatgaaccgttgagtttcggcggttgtgcgacagcaactttgaagagtggtagctaatatgttgactccgaaaattaaaatgcagatcatgcagcacgcgaaggaagtctacccgcacgaatgcgccgggctggtaacgcaaaaatcacgcgtgcaaaaatatcaccgactagacaatgtttctcaagatcctgagaacgaatcaatgccggacgaaacgcagtatgcgatggcgtcaatggagggggagccgatcgccttcgttcattcccatactggcgacggggcgaccacgattccgagtgccacagatttatgcttttgcgatgagtctggattgtcgtgggttatcgtctccatcccggaaggtgatatgcgaatcattgagccgaaacgccgacctctgattggtcgcccctgggctttgggcgcttacgattgctatggcctaatcatggattttcacaagcgccacggcgtcacgctaaaagatcggcgattgccgttcgaatggtggaagccggaatacaaagagaatctttaccaggattactggcaagaggacggattcattgaaaacactggcgagcctgaagttggcgatatgatcatcttccagattcaggcggaaaagtggaatcacgcgggtatttacgttggaaacaataacatccttcatcacgcgtttggcaagctgtctcgccgggatatctattctggatggtacgagcagcacaaggttttaatttgcaggcacaaggagcttaaacatggcatcacatacaaagacgattaaactttctggttcccttgggcgtaggttcggagtattccacaaacttgcggttgattcggttgctgaatgtatccgggcgctgtcttaccaggttgaggggtttaagcctttcatgcagagcaaggttggtttaaatatgcgcttcggcgttgtcgccgacggaaaaccaatcagcgcgaacgaccttgcgacttttgccgtggcgagggagattagaatcatcccgatcccaaaagccagaaagaacggcgggttgttgcaggtcgttatcggagcggcgattatggttgcggccttctttactggcggcggctcgctggcggctatgggcgctttttcgtcggcagcattcatggctggcggatcgatggttttaggtggcgtaatgcagatgatcgcaccgcagatgggcggcaacatgcgggcgagcgaatcgcctgagaataagccatcgtatgcgttcggcgggccgattaataccacggcggccgggtatccaatccagttgccatacggttacagattggctggaggcgcattgttcggttcgggatcttacgcagaagacaacaactaattaagccattcgctttttagcctgggggcgtagcctccgggctttttgtcgtgtacaattgcgatactattaacaggaggctaaacgatgactaatatcaaggcccgcaagggcggttcaagcaagccacgcactcccgtagaaatgccagataacctgatctcaaaagataagatcaagttattgcttgctgtttcggatggcgaggtggttaacgacttcagcctgaagcagttgcattttggaggcgtcccggttcagaacgaggatggaacattcaactatgagggcgtgattgcagagttccgccccggcacgcaaacgcaggactacattcagggcttcagcgaatcaagcgctgaattccaggttgctcgtgaagtcactcacaacacgccttatacgcttaccgtatcgaacaaaaatctttctgccattcgctttcgcctgttatggccgcgcgtgctgactcaaaaagataacggcgatatggtcggatcggttgttgagtacaagatcgagatggcggtagacggcgcaagttatcagacctacctaactggcaaaattgacggaaagaacacgactggcggttacgatcggagcattcgcgttaaccttccgcaaaacttcacgtcgcaggtgcttatccgtgttagccgagtaactccggacgctgacggggtgaaggttgtcgatgcgttccaggttcaatcatacgctgaggtcattgatgcaaaattccgctacccgttaacggccatgctttacgttgagttcgatagcgatctgttccagaaccagatcccaaccatctcactcaaaaagaaatggaaaattattcaggttccgagtaattacgatccgattaatcgcacatactccgggacgtgggacggtgtttttaagtgggcgtggagcaataacccggcatgggtgctttatgacctgatcatgaatcagcgctatggtttagaccagcgcgaacttggcatcccggttgacaagtggtcgctgtatgaggtggcgcaatactgtgatgaacttgttcctgataatcgcggcgggatggaaccgcgctatttgatggatgtaattgttcagtcgcaggttgaggcgttccagttggtaagggatatttgttccgcgttccgtggaatgacgttctacaacggtgaaagcctatcgattatcgtcgataagccgcgcgatccggtgtacctgtttacggctgataacgtcgttgacggcgttttcgttcggacgttcccaagcgaaaagacgatgtacacgtcgtgcaacgtcatgttcgacgacgaagaaaaccagtacgagcaggatgttgaaccagtattcaacccggacgcagccatgcggttcggacacaacccgaccagcattacagcgatcggatgcaccagaaggacggaggcgaaccgccgtgggcgttggattctgcaaacgaacctaagcgccacaaccgtttcgttttctactggtctggaaggtatgattccttcttgcggcgatgtgatttacgttgcagatccgcactggcaatctgcctttaacctggtgctttcagggcgaatcatggaagtatccggtacgcaggtatttttggcgttccgctgcgacgcgaaggctggcgacactctgatcctgaataccgacgacggcaagcctgtgcgccgcacaatcgccagcgtttcggcggacggtaagaccctcacgctaaacgttgggtataactttgacgttgcgccggacagtgtattcctgatcgagagcgatcagcttgcagcggaacagtatgtagtaacccggattgaaaagggtagtgatgacgacgaattcacctttgccatcactgctacgcagtacgatccgaacaagtatgacgcgatcgacaatggggtaattaccgatggccgaccaacttcggttgtcgacccggattcaatgggcgctccgaaagacttaacgattagctcattttctcgcattgttcagggaatgagcgtcgaaacgatggtgatcggctggtctgccgtgcagtatgcaaaactgtacgaggtgcaatggcgcaaggatggcggtaactggaacaacgtcccgcgcaccgcgacaacgcaggttgatattgaaggcatctatgctggcgagtatcaggcccgcgttaggtgcattggcggcgggaatgtagcgtctccgtggtctgctttggctagtgcatcgctgaccgggaaagtcggagcgccaaaaggcccgattaacctttttgcatctgacaacgagatcttcggcattcgcgttaagtgggccatgccagaaggggcggaagacacggcatacattgagctttaccagtcgcaaagcggaaccgatcaggacgcaagcctgcttacactgattccttacccggctgctgaatactggcattcaattttgccagctggctacgtgaacttctataaggctcgaagcgtagacaggatcggcaacgtttcagaatggactgattacgctcgcggtatgtcttcgactgacgttaacgctatcacggatgttatcctggatgagatcctcgacagcgacgcgatgaaagaacttcaggagagtacgcaggatagcgcggcaaaactcaatgactacgcgaacagtatcattcaaaatgcgctggcgaatgatgcggacgttagaataatgaaaaaggagaatggaaagaggaaagctgaaattaaacatgcagaagttctcatcgcaaatgagacggaagccagggtgcagcaggttaaccagatctcggcagaattcaacgaaaacctaaatgctggattaactcaagttaatgaggcactagccaatgaaactgaggctcgcgttacgtcggaagaggcgctttcagcaaggattggagagaactccgcagcgctagatcagaaactagactcatgggctgacgttaatggagttggatccatgtatacaatgaaacttggactaaagtacaacggacaggaatataattccgggatggccatgcagcttacagcaagtggtggaagcgttgtttcgcaagttatgtttattgctgatagatttgctatcatccgaaatgctgagtctggagcgtacacgttgccgtttgttgtgcagaatgaccaggttttcatgaataacgcgcttattcaggacggttcgattaccaacgcgaagatcggtaacgtcattcagtcaaacaactatgtttcaggtagtcgaggatggtcaatagacaaaaacggaacctctgagttaaatgaggtaacagtgagggggacaatttacgctactgacggttggtttaagggtactgtttatgcagagcatattgaaggtgacgtgatgatcgcagagtcaaacacgataccattcaagacatattcagatattgatagcggagattatgaaatactgaaaattcatggagaaaactttgataggagcatcgatacgaacctgattatacaagtgaattctacattcaggaatacttttagagtaattgttcagactccagggaagggggaaatagaattctacagtatagacactggaaatgacggaggtacaagagcatacgcgctacgtggcttcgatttaccagcggctggaagagggcaagagaataggatcatcgttagggtaactcaaagcgggaggggtagcagcataaaaacattcactccatgggttgagagagataatggaaccactggacaagaaacgtctgatggagtcatatataacactggttttatcagagagagggcatacatatcggcatacagaaaaggaaatagaatagtagtctagtgacaaaagcgcccggctgggcgctttcttttaatatgaatcatagatgtaaaaaaggggccgaatggccccttttttcttttgttgtcttgatatgcttgatatgtcatatcgcaacaaagttgatgttgtttttgtaaactcagattgtttctacatgagttagtctttgcagaccgtagatggtgtgaagcgtagcaaatgccatttagtgtatcctcttgtcgcgtctaataatgaatttttagtgattacattactgtaaccagccaatgttattgcctgaacgcccattgatatcgagcagcaggttaggtatgccagcaccttttgcattctctggaatgccaaggttaattgccccacgcctggttgatggtgggcttggaggcaacagcgcatattgcggtttctcccatatgttgccgattagggttgtcagtgcgctcagatcaggggctgtgctccatgcgtcagaccagataatgttatttttgaggataacttgagacgctggcgcaattgttctggttcccgttgacagttgtgcaatgatatctgaacccttcatccacttgcagtagaaaatgcaactctccacagtcagcgacggaacagatgcactctcagtgtcgtacccatttgttgatatcaggcgacgctgcttgacgcttgacgtgtcaataaacacacaattacggacggtattattgaactggttgcggtggtgagatatggaacatgcgtcgtttgtcggattcccaatctgcccctgcagcctctgaattccatcgttgaacgcgaaacagtattccactacgttattaccactcccctgccgacgtgtgtaataaaactcaaagttgctcatcccggcaggtggagctgcctgtagccctgcgttatcagcagagacaaacatcactgtacgggcgcagccagtggagtaaacgtatctgacaacgttatcccaacacataccgtcaatatcaaccgccatgttgtcaggtgccattggataggagccatgcacctccagtttttcaaacataacccgattacaatgccacatccagaaaggtgcgtcatacgccgacactcccccagtagtaaatttatcccaacggtacgaactgtagtagcagtcacgaacgcagctctgccactcgttgtccgtataggcgtcgttcttactggcacaagtgtgaattaatgccccctcctgtacaatatttgtaaacgagcagcgtaaaacctttgctccgtaagtacgggcggcatccccacggttatcagtggtatcagatacccaggtattgccacggatatagacaccggcgttaaccatattaaacatgcagtcttctacagtcattttatgtgcgggattagaaatatctgcaccataaccgacaccaaaaagctgaacgtgcctcccaatcgtgtttttattcggattgcttacagagtatgcattacctgtgaaataacagtttttcacatgaacatcagcaaccccatctgcatcaccagtgcattgcaggttaacactggttgctgctgaggtaaacccgtcatctctgtccataaaatggatgttccgcaccgtaacgcgacgggcattccacgatgctagttgccccgcagaatttgagatggatagccattttggcggcgggccatccccgtatgtgtcaaaaaaactcatttcagacgacgtgttcactaacctggcattaacggcctccttcaacactgtgccgcgcctgattagaattgaaaatgggtagctggtgattgctgcaatagcagcagtaacagttttaaacgctgatggaattggtttattttcatcatcagaagggtctacatataagtattgcatttttagctcctgttaagctggttgaacgtgcagatcgagccaatcgaaaccgttaatgtttgccagtgtcccggcgctcgttctaacttcgatagtgaaggtattcgtgccctgagatacgatgttaactatgtacggaggtgttccgaacgaggttcctgagaaaccaacgggagggcaaaccttccagtggtctccacgtaaattgcatccgctgataacgtactgacctgttgatgggttggtgacagcaattctcgcttcatttcctttattcgccagatgatattcaccacctatcgcaaaaaccccgtctgataatttatcagatagtcggtcagtcacattcccggaaacgcgaactacagttcctggagagtaccgaacatcaccgttattcattttcacgtaaaaacgatctgtcgccattttctctgcgaacgaataaaccagatagtttggagtatctaccgttacattattccgtaagtcattatggtaaaaagtcaccacattggggtcagcaacattaatcggggtgaatgatattttttgcccatacgacggaagtcgcaggaatagtttcgctactgagttattttggtcattaaccaatcctaccgctggcgttaatgcagaatccccccagccagattggccgccatgcagcgcggtaactttcagccattgatagatactgccttggtcaatggacggggcgttattgagggcttgcgggttaaacgtgaccatgtaaacatttggcgtgtagttaacatagttgcctaccgacagaataccagagaccacttttgacccataccccgagtagttaacatcaaacaagcgataaagaactggtgataaattttcaactgtagggcattggtcaatcgttcgttgcaatgatgtgccgatgtcgaaactttttaccagcttgaacatctgcttatcgatagatgagccagtagggtatccaaggtcgttaaactggttggggctaaaaacgaaaatatcgataataccattatcgttagtggtaataagaaaacctgggcttaggtcatcagattcatttccagcagaggggaagcgaacaattttatcttcaaatccattatgaaaatatccagtgccctgcactattggtgttgaaatttgagcagctgataacctcccgtcaacaattgcatatgtctgaatgcgtccgcgctcgtctaagactaaggcagctttattattcggcccgccgaatactattccggcaacgcctgccgggtcgcctggcatctggtgaatttcaaattcaccacgcttaaatatacgctcccatactgacaggttaacatctccaacgctctctggcccttcacctgagaaaaaattaccaattttcatatatccgtcaggctgtgccaaaactacaagcgttgactgttcgccagcatcattgataatttgctgcacttggtctctagcagtctctgctgcaacctctgaagtttttgccttactttcagacgcagccgcagccgcagcgcttgattccgcagcttcggagtctgccttaatttggttggcaagattttgcaacgattcgaaatcgaactccttaaagaactcgactgcatccgcaattaccgtttcctgtgactgataatagcgaagagtttccgcaacatcttgagccaggccgtcaacggttagtgagtcacttaatagtatcgcataatcactagacgctacgacagcgccgtttgtggtaattgctttaatttcagtatcgctgacaaccttgtttactacggccatttgaattggtgacgacaaaaacataattgtcgctccagggcgaatcagcgaaagcgatgattgccactttgtgccagtgccagtaactgttccgtctgcggacatagccgctttgccttctctgtatagtgccatgcatttagtcctctttggttgattgagtaacgcagataatagcatcaatgcacagaaaaaaaaaggagcttttcggctcctttagttgttaaatcagaatgggatatcatcatcgaaatccattcccggattcccccagccgttttgaggtttaggcgcttgctgcggattgggttgttgaggctggccacacccggattgctgattgccgccgccgctttgcgcaggttcgcgctggctgaattcgagttgcggcataatcatttcgttgtggctgtaaattgtgccgttgtgctcgcggttcacgatctgaagcgtccggcaggtgacgctaatcaccttatcaatttgcagtgcttcgtcgtaccacttaatcatgttttctttggcaaagaaaacggcgcggtagttcgtgtaaaccgtttcgtcctggccatcacgattgcggatcttcattcgctccgacaggtctacggcgtacattttccacggcccgttattgttgctgccttccttgacatacggttcctttcggataacacctgttacaacatgcattgtcgttcctatggggcggtttcccgcccggttaaattagttgaaagatgaaatatcttgcgcttctggttcaggttttgattctaccttttccggctcacgtttcgcaacctcttgcggcttaccaggattgaagccgtttgccggggtgactttcagttctgcctggcgtttggtgatatcgtcttccgtcattttccattccgcaggcgttaacgtttgtttcgccagcttatagatctcacgaagcgattcgagatcttcgcacgcgtcaattcgttttttgaagtctttcggcgtcatcttcgtaatttctgcatcatcatccgcctgcttgatgccgagagctgcggccagtgcataacggcgggcgtaagatgttgttgagccgtatgcttgttcgacggttttactgatcggcatattgtactgaaacgccatgaactcaccgctttcatgcaggaacatcgtttcgaggtgcataaccttttcggtgctggtatccatcatggattgaatgaccataattttgtttttctcaagcgccggggaaatcgcgtcgaggatatccccaagatttgcataggtgttccccaggtggttgttcttcccgcttttcttcgcggcaacgaagccagattttgccttgattaatgctgctgcgatggttgtaaatttttcagatgtacgcatgataaagtttccttttcctgattggtaatgcgcactatatcacaagtgcgcaccagtgtttagctatttgtgccgtatacgtccgggaacatatatttcacgaactgcggagtaggcaaaacgacttccgccgcgtttgactcatatgatggccatgaatcatgcttcacgcattccgcatactgatgaatcacgctttgatactgcttgcgaccgatatcgatctgctggctggtcagggtgaacgcaagcggagcaaacggtgattttttctcctgcgttagcagtctgacaactaccgggcgtttttcgttgtaggtcttcacgaacagatcgcgctgcaatgccatcttgagatagtaaccaaggttgaaagcgagccgcccgaaatcgtcaggcttggaagattgcgttgttttgtagtcggtaatcaccacgacctcgaaaacttcatcagggttgaatccccactctttgattagttcgggatcggaaacaacgtcaacatgatctagtcgaaccttaaccttgacgccgaagatctcaccgaagatcgacaattcacgctgtgcggtaggtgattcgatacaggcggcgtgtcgcgggttggccagcatcacgctgcgcatttgaacaaccgcatcgaaatcaacatccctaaccagcttccgcccggagttcatcgcggcgctttcgtcgcatagttcaatcgcccaccaaacatttacgtcaatcccggcgcggtatgccatctccagaagttccgggtaatccttgttggacgtcccaatcaggccacacgctttcagcttcgcagacagtgccgacttcgacgtaatcagatctttaacctcgcccggagaagtcgcccgcaggtactcgccattaaattttgccgtctcaagcatacaggtatgcgaacaggttccgaacgccagcgcggcggtttcctcgcgcaccttgaatttccagtgcgccggggatgttgcgtaaatctcgccgaggcttgagccgctaacgtattccgcgcaccaggaatcaggatcgtgatattgctcgttagtcaattcactgcttgtgtatgccctgaaaattgcttcagccattgatattgctccatttgtggtttcgttgcgttaagtatacgcatgacgattacaggtgcaaggcaaaaagtgctattcgcaattggttaaaaaatgagcgaaatttacgtaagatttagtaagatgcatcttacgtgactttccccatacatttcattgagttaatgcaaatcggtaagatggtaagatccctataggtaaatatccacgaaaaatctggcgcgggatcgcaaagcaaaagacacgtacccggagaaaccttaccaagataaatatagagagatagaacaataataataatattattatttatcatatacttactatctatatatggcggatagttggttaaattttgcgcgaaatttacgcaagattcatcttactaaatcttacctaaagtggttcgaccagttgtaagccactgaatttcaggaataaaaaaaggtaagactgattttgctcaatcttacctaaaatctgatcaatatttaatcagagaagcgacgatgccttgtacaacttacgttcaaatccgagcttaaagttgtcaccgttcggaacgataactttaagatcccgatcgtcagcagccgccagcatatcccgatctccacgacggcaaactacccgcatttctcgcttaccttttccgcccttgcctttatacctgtacgccacgatctcgacgtttgaaggtatgatgcaggcccaaacgtcgcacttgaacgaactagcaatattgaagtgcatcgcctcaatccaggattgagcaaggtaaattggcccgttaccgtcgtcgctctgattggtcactatcaccgatccgaaggtcagatcgccagccaacatcttctcccgaccctcctcatcaatgaacagcatgttgcaatactcatcatctggcccatcctcatgcacgagttgcattggtagcgcgtgaattagctcctgtctgccgttctcgtgagtttttacgccaacctgatatgatttgatatactcattttcaatgccctcatagagcgttacaggcgtgctatcgacggcctccgttctgtttaaaactgccatcactctttcatgatctgccatctttccgtagtcatacccgttatcacgagctacctgcttgtttctcttgaccacgtattcttgcggaaccttgccgagatagcgcccaagaatgttgatgcactcgctatacggctggccgcttaacttcattaaccagccgatccccttatcagcaccgcagcctccacagtatgcgccgccgtctccgcgcgtttctaacttgtcagtccagcggaatcggtctttgcctccgcagttcgggcagtcctggtgcttgccgttgaagtatcgagagtggatgccgcaaatgttctgcaacgcttcgcgccacatgccagccatgtacggcaaaacctctttttcatcgtaaaaatccacgtcgttacctccaaataaaaaaacgcccacacgagaatgataacccggcaggcgtttagtgtttagacaaattgtgctatcggactacgcggagcatttcgcggcggtcgcatcggcgcgtcactggctttccgttgctgtcaaatcttaaatctggtcggcagaatgaggcgcggaatcctttgcaattgttccgtcggtagctcttatgtacgagataagcgccatcggctgagatcatgccgcgcttacgccactgctgaacaacctggatactaacccccaactcttttgccgttccagcgatgccaccgaaggcatcaataaccaactccatccgcgcagtcaacccggcgcgaacctcatccttcagcacgtagtaaccagtcggtcgcttgcgtttcttcttatctttcccgcgcgatgttccgttgttgccgttcaaggttcgcttatcaacctttgccatttgttccataatttaaccctcatagcattttttgttaaacatgataaaatgttccctgtattatacacgcaactatgcgaatgacaaattaggattgcccatgctcacaattgaacaacaaattgaagcctacgcagataagatcacgttaatacaaaagcgattcacggttggcaatatcgttccatacccatatcaggcggtggcgtatattgagacagcaaagcggatcgcaaaatatgaacatccgttttacattaaggcttcggtttccgccgggaaaaccatcatgatcgccatgctcgcagcgcagtgcaaggcaatgaacttacccatgatggttcttgctcgccaggccgagatcgtgaagcaggattcagaggagatcagtaacctcgacgttccgaactccgtttattgtgccgggttgggcacgaaggcggcatacttcccgatcgtcgtcggatctgaagggacggtggttaatggtctgtttaaaatgctgggtgactatacaccttcagttctggctattgacgaatgccaccaggttgactggcaagatttggcggaggcgatcgccaacaatgaatcgttcgagtacatgagcagaccgaaggataagccgtatcgcgtgaacggtgaactggtcgatgccgaccacccatacgacgaaaaattcgactacgtagaattcggcggcggtcgaacacagtacaccatcgtcatttgtgagttaatgcggaggtgccttgagaagacagggcgagaacttcgcatcgttggctatacgggttcggagtttcgcggcgtcattccgattttacaggaagacaagagccagcctggtttttggcgcgagcagatcaccgacattaacacaaactatcttgtcgagttcggatcggtggttccgacaatttttggtgatactgaatccgaagggttagggtatgacctgtcagaattccacggttccagtcaggacggtacgcaggattttagcgcggaagaattgcgcaagatggaaaagaaaatccatgaatccggcgaaatgacgaagctgattatgcaaaaggtcgtggagcgtgcgaaaacccgaaacggagttctgataacttgcgctggacagcggcattgcaaggaggcggcgagctatctaccgccggacgcaacatacgcgatcatcaccgaaaagacgaactcaaagaaacgcggcgaaattttggataaggcgaatcgcggggagattaaatacatcttccaggtgatggccctaaccactggcgttaacgttccgttttgggatttttcggtgatattgcgcaagatcggatcgcttacgttgcttattcagcttttggggcgaggtatgcggcttctaaaggactggcaaaaacagcctccttactcgtgggtgaaagaagatcaccttgtctgggattttgccggaacaatggatgaccttggccagttgtatttcgatccgattttggagcaggcgcaataccaaagacgcaagagcagcaagaacggccccaaaatttgcccggtatgcaagggagaaaatagcgagtacgcccgccgatgcatccacaaagacagcaacggcaatcgttgcgaatatttctggatatcgcagcgctgcgaagaccagaaagacccgcgaacagggaagattaaggtaaaaggttgttacgccgaaaacgatattgttgcccgccagtgcagatgttgtggggtgcagcttaaagatcccaacgacaatctcaccgggaagcattatacgcagaatgactggtatgatgttgtcgggttcgatatcggcttgactcgcaatcagtccgggatcatcttcaattacgtgttactgaaccatgacggcgagcggttcaccgccagggaaaagttcttcccggaatcagagaatcagatttgcggcaagttgtggcggcaaaaggcagtctcccagcacgttgacgacgcggtaatgcgtggcaagttgggcggtatgaaaaacgcccgcaagatcctggagtatgcggaatacttccgcgcaccgaagcgcgtaacgcatcgcatcaacggcaagaaggaagatattatttcacgcaaagattttggagacgcagaatgatcgcagataaaggtgattatctcgaatactacggcgggcctgtgaaggcttgtccgcttgagaaaatcgatcagatgaatagcgtttcgtggctgcggcacgaataccctgattatctgttctggcacacagtcaatgaaggcagcaagcacaaggcgagcgcggttatcgatcatcaaatgggattgcttaaaggcgttagcgacttcgttatcctgattggtttcggtggcaaatacccgttcgcagccattgagctaaagcgccagggtaaggcgcaggcgtcgccagtgagcaaggagcaaagggaattccttgctgccgcccggcgtcgcggcggattcgccgccgtggcctatggcttcgagcaattcaagattgctttctgcgatgccataaaatagcactttttgttaaaaccgcccggcgaaagccgggtatcatttccacatcgaaacgaagaatggagtgttgaaaatgaaaaagatgctggctttagttgttctgtctcttggtcttattggttgcagcgaaaaaccgaaaacatatgattgcggtggtgaagcgtttgaggtaactagcaactatatgaaagttgtcaagggtgaaaactctggcgttataattgatggcgctggcgaaaatcaatataaactgcttactccttttgggtacgctcattatgcagtcaacaaaaacactattgatgttagcgtgggcgcttttcacaataccttaacctgcgaggttaaataataatggcaaaagatatcgcagacaaagacactcatgacgcattcatcacgtttgagcaattggagcgcgaaacgtttattggcaacgcccttgccactggcggacactatcaagccgtcaggccagataagttctatcaggtaactggcaaccgatacgcaggtagtaaaacgccggatattgtgcgcgacaagtgggcgacagatcgaagtctgatcgcatacatggaagagcgttacggcaattacgatcttgatgtcgccgcagaccgaagcaacgcagtttgcccgaagttctacgacgaaaaaacggattgccttaaacgctggtgggggaaaaacaagcacatttggctgaatcctccttactcgtttccagatccgtttattctcaaggccattgagcaaatggagcacgacaaccagatcgacattctgctacccggcgacaattctactgcctggttccgtgacgcgcagaagatggccgccgaaattatctggattgttgccgatgttgaagaggatgattacgggaacaagttaagtcgatccggtcgcctcgccttcatcaatggattaagcgggaatccagtcgacaacaacaataagggaagtgttattttcatcatgcgcaagctcaagccgggagaggagcaaaagacactttacattccggtaagcgagatttgcccgtcattagctaaaaagcgtatgcgcaaacgtgggatctgaaaaatggaacagacagagtctttcgccgagtatcttcggatcgttgttgaacttctggacaagcacggcttcattgggacggatgaggaaaagttagcctttgctgacaccatcgacggaacctacatggagttcatggacaacggaaccccggtcgctgactggccagaaattcttgaacgagaattgattgagtttaaatcacatgaaggcgcggagtatttcgcaaaacagcactaattgctaaacaatacccgccgcgtgcgggtattattactccaccaaccaatcaggagcaaacgccatgaaaaccaaaaccattgcagacaccatcaagatcgtaccagtaaaagcgcaagtggtatcgcgtcaactggttaacctgtctcgcctgtgcatggccgactacatggcgaacccttcagataattgccttgatggtgtagtcggtgagatttattttcgcgctggttatggactggaaagcgtggccatgtatgagcaaatggccgaaggtttttgcatttacggtgacgaatgatgattgtcgagactggtcgcgctgccgtatggcagcacgcaaaagaagcgggaataagtgatgatatcgtgaagatctcaaagtatttcgatatcaaagatatatcaattatctttggtgggaagctcacctatctaaacgagcgcccggtgaagcgcacgcgaatagcagtggcaacgcgtgcggaggccgacgcgctgaagatgttcatacatgagtcgaaacagcagaaaaaatattacaagtagcgggggcgtgaagaatgcgatatattgcgatcctatttacggcgatcctgttcacgatcgcaatcatgaactgcgcaattcaattaggataaattatgttaccgaaaatcacagacgaagaattcttagccgcccgcgaggaaggtaagacctaccgcgagatcgcggaagagttcggcatgaacattcgaagcgttgaacgtcgtggcgttcgcctggcacgacaaggacacctacacggaaacgcccacgtttcgaagcatatcccggacggcttcggcgtcaaaggcacgtcgacgatgattcgcgcggacggctccgaggtcgttcggtgggtcaagtcggaagtagacagagatcgcatggtcgcgcttatggaggcggcgcaggcggctttctgcgaagaccttccgcgagctgaaccgcaaccgctggatgagtcgaagttctacattgaagatcagcttgccctgtacccaatcttcgacctgcatattggggctatggcgcataagcatgaatgcggcgagaactatgataccagcacggcagagaaggttctaaaccgcttctttgattattccgtgtcggtggctccgcaatccaaaaaggctgttttgctggttggcggtgacttccttcacagcgacggcctggacgcagtaaccccggcaagtggtcacgttctcgatcaggacagccgatacgcaaaacttgtttatgttgccatccgctcgctgcgtcgcgccgtgtcgctactgcttaacaatcatgccgaagttgaagtgcaggtaatcgaaggcaaccacgaccaggccgggatgatttggctacgcgcagcgctggcggcgttctatgagaatgaaccgcgcgtttttgttgatgttagccctgcgatcctgcatcgcaccttgtggggcaaaaccatgctgggctacacgcatggccacacgatgaagaagcctgaaacgcgccttgctgcgatggctaccgacttccgcaaggagttcggccagtgcgactacatttacacgcattccggccactggcatcaccagactgtaacggaacactcgttaggtattgacgaggtgcatggccagttaggggccaaagacgcttacgccgctcgcggtggttggcgctcctatcgccaggcggcggttattctgtacagcaaagaatatggcgaagtaggccgctttatctaccgcccgaacatgtaaccacaacggccccgcgaggggccaacaaggaaaaccgatgaatagaaatatctgcattttcgatctcgatggcacgttgtccaatggcaaccaccgcttgcacctgctgccgaaaaaggatctccaccttacagaaagttggagtgaatttaatggtgcatcaattggcgacagcccaatccaaagcacaattgatgtagcgaatgcgcttcatcgctccgggatgattgtcgttatcctgaccgggcgatccgatgaggtgaagaccgaaacaatgatttggcttgaccgttacggggtgaaatatgacaggctcatcatgcgtcgcgccagcgacaaccgtaaagacacggtaatcaaggaggaggagttacgcaaaatcggaattgatcgcattgttgcggcatgggatgattcacccaatgttattgcgcacttgcgcggcctgggtattacgacttaccaggtctgcgactacggagacaatcttcaagatcatttaaaatcgcacggagtagacaaatgaaaaatgtaattattctcaacggagcacccggaatcggaaaagataccatcgcggaaattatctcgcggaagtgggaatacaagaaccttagcttcaaacagcctatgtttgccatcgcgcgtgctgtgcttggatctactgattttgcacgctttaccgccagataccacgaccgcaagcacaaagaagtgaaatgcgattttttgggcgaccgttctccgcgtgaattcatgattcacattagcgaaaacttcgtcaagccgaccctgggcaaaaatcagttcggcaagttgctttgcgattcagcgctaacttcgccgtttaactgcatcgtcagcgacggcggttttgatgaggaggtcgagcacgtcgcagcgcatgaggcgcttaacgtatttgtcgtccgccttcatcgtgacggcatgacctttgagggtgatagccgcaaacacattcgacgacccgatctgatttgtgacacgtatcacgaacttgattttgatatgaccactggcgagcctgaagacgacgcgcaaaaaatccttgatatggtttcagatgttgcattaaaattataaagttaatgcctttattatcaccaccttaacgattgggaaccttgacgggttcccttttttttgttcttaattttgccaaatgaatatatcatcaccttaccatttaactaacagaggttgcatatcatgcgggaattcatcaacgcggcaaccaatagcagcggcggtgttgcccttgcgggatctgcatccgggcaattaatcattgctgccattggtttatttttcatgatcttatttggctcaatcggcacgtggctgaagtggaaagactcaaaagccatccgggaggcgattgattctggcgacattaaagaggcattgaggatcaggagcaaataaaatgggaatgaaaacgcggcttactttcgcggcggcggtggcgatcgcggtcgcgttcctccccgaagtggaggacactaaatacacggtttatacggatatcgctggcgtaccaactgtatgcgaaggaatcacaggcccggacgttatcaaggggaaaacctatacccggtcagagtgcgacgcgcttttaaccaagcatatccaggtagcaaagcgaaccgttgacagcaaaatcaaagtagatgttcctgacaccttcagggcgtcgatgtacagcttcacgttcaacgctggcggcggcgcatattctggcagcaccatgctgaaattaacgaaccagggccgattgcgcgaggcgtgcgagcagctatatcgctggacgtactaccgcaacccgaaaacgggtaagatggagaagtcaaaaggcttgcataatcgccgggttcaggaatatcaactatgcattaaggatctaaaatgattaaggtaattggtgtggctcttacggttgttcttctgtctggttgcgcttccagtgtcccgatcctttccgatctggtgggcagcaagccggatatgacggcgcaagtaggcgcggagaacgttaaacaggcggttggcgtgacgaacaaaacggacacgtcaagcaagcaggagactacgttcaaagagtcggcggtaggaaaggttgacacgtcgaacaaaaaatccgtaacgacctccagcattcacgccaaccagatcacggcggacaagatcgagatccgaaacgatgaaagcggaagcctgactccgtggctgattggtggtgttggggttgtaatgctggcgataggtgcgttcggtctttggcgggaacgaaaaaacaaaggggcgtaatgcccctttttctatatgtaccgcttgacgtgcaatagcgctactccgtcttcatcgttaagaccatgttcaaccgtgttggttgcagccattccttgatagagcaagatgagcgcggcacgcaagtaattttctggtgtgatctgtttcacacaaacaagcctgtgaacttccgttatcagatcttccacctggtttcccgaaaagctgttcatcactgagttggtcaaggtgcatcatctcccatatgtatcggttatccatcccttcgaacgaccggaaatcaaaacctatttccctgttatccggccccgtacaccacacagagccgttttttccgtcaaggtatccattcgtatagcttcgcgctaaaaactccttagagaccattgaggcgaacatacgttgcgatacgttggcggcttttgccagtcgaggcgcttcgcggtgcgtatagacgaacttcgcaaaatcctgccgggtgaactcccggcgagattcgcagaacttgtaaatgtcaagaataaacatcaattacctcatgaacgacgggttgataaagacttcggaatccatcacgcagataaagcctaattcctccatcttcggcaataagcgttccttaatctttttgctcaccccggcctggcctttgaagatcttcaggttgcggcaggcgttataaatgccctggacggtcataacaccttttgcctgtttgcagcgactggcgataacgtcatacatcgctttaatttccgctccctcaccagcaaagccggaagagtcagccgacgacaaatacgttttgctcaattcatggaacataatgatcgcttcgtcaatggtcgccgtgtcgatcttcttcgagcgcttcccgccgggttgccagttccggatcgtgtgaatcacggacgccagacgcataacctgcttatcaaacttacccatcgcgccgcgaagcattgtatgcgaatacttgccgccgtcgcctaactccggttctaactcctggcgggccttgttcagcctacgcattgccgcgtcagtaacctgcaacttaatgttcgactcgctcataatgtcatgaatcagccggaagtaatccgccttcagtgactggtcgatcggctcataggtcgaattcccgttttcgtcgatgaacacgcgttcacccaaacgggtttgctcacgaaccaaaaggaagcgttcagataccccgatcccgcgagagccggcctgcataatggcgtcgatggtttcatcctgggcaattacgcaaatgcagcccaaagcctcgaatgacatattgttgctaacgtcggcacgagcgatcgatacgtggcctttatcccatgctttgagcaccagttcgctgttcgtcttcttaccgccatcgtttccatacgtgatccctaaaaggctgttaaccgccgtcgcctcatcggaaataacggcaaagtttccctgtcggttgttaatcttcgccagaccttccggggtggtatcagataccgggaaagttaggtcacacaatttttctaacttctcctcaagttcgtcacggtcttcaaaaagtttcaccatatcagattgcgataactccccttttagcgcctgcttgttggcggacagcttcgccatgattttcttacgctctttctttcgagactcgttaatgcgttcgacttcggcgacaataggatcgatggcaagcgagttaatggcagacttaccagcggaaggcggctgcgacgtgataacgtaaagcgttgtcggttgctcgctgccgtggtactcgacccaaaagcggcccatcatcgcggcggatacggttccgagaaagtgcatgtaagcggatgattccgggaactgaacagaacgcgctgcatttagcgccagcttgccgacaacatcataatcattggcgatcgagattgttggatacttatccgcgtttacgtcgatatctttgggctttggccagaatgaaacggagtcacgatacccgttcgcacgaatcgcaacgcgcaggggactgatcccctccctttctgcgatggcgataatatcttgcggtgatacgcggtcatttaaaaacatgcccttgctcctgattggttaatcgttcggctaatcatatgccgtattaaatccgagatccagtgataatctaaacacgcttgaaaaacgcgcttggattatcggggcgcatggccccgaacccgtcacaggtatttagcttcgaaagtcgttccgtccgatacactgaagccaacttcctcgcggtacagcgtccagcggcatccatcacgatcgaagatgtatccggcaaccgcgccgagcgcacgaccgctttctacctggtagcgcttgccgacgctgaaggattttttcatcgggttgctatggtcaaggccgacgcattttagcgttttggtttttagttcgatgaacgtcgcaatcacctggccaccagcgccagcaataaacaactcgccgctaacgcctaccgacaaaataacgcgcttcttcttcagttcgacgctgtcatataccatcattgacacattgccttcatcgtcgacgcgggcgggataaaggttattttcgtgtatattaatagcgcggcttgacgtgcatttaatcttgattgacttcgccatttattttctttctccgatctcgatgtacaggtttaccaaatccagaaagtcagccttgcttttgcaacccaacttaaagccaacgtgcgactcaattttattttgcatcgcagccagtgttgcgccgccattattcatcctgagaacttcgcggcatacttcggcgagcttttgagatatcatttcttcaccacctttatttccatgccttcgcaagcgctcttgatatcattaatcagacgattaagccttaaatcagtcattacatggtgatgacgtatatcaataattccagcaacgactaacagcatgacggcaaagataaaaccaccaggcccggacatacacaaaacagttaacatcatcaagataataaatttcatttccgttttactccgttgcgtttcgatggggtgattctacccgactttcgccgggtagttttagaaattcgtgctattctcgataattcgcctggaacacggcgcgggcaaaacctcgcggagtaatggaacgcagcattttagtcctttctgaccttccacccaaaaacttccaggcccaaaagaaattcacgccttctactccatccggcggcgtgagccgtttcggttcgacaaaaccgtttccgtgccatatgcacgttttcttcgtgtaattgtcacagtggggcattttgggatgccacacaggctcgttcggagaaacatagccaccgaagtcgcgcggatggaaataaaaatccggctttcgccatagtgacgataatttcccgaccgggttttcgaccatccaggggcaaccatacttattgcctaattgctcgaccatcttcgcatcccctgctgcggataatacgtcattatcttcccttacgtgcttgattccgctatgcgctaacagcgtgcatggcgggaaagcgaaaatgaagtcaggatctggaatgccgagaatcgatcgcttaacgtcaaaatccttgtcaatccaaatgttaacatactggatatttgggtgaaccattcgaatgctatattctccgtggtcgccggagtcggcgttgaaacagtacaccttgcatcccttgatggcccacggcaggcccatgatgccggagccgtcgaacatgcagtaaataaccttttctttcatgctttccacgcctcaatgaacattctgttcgattccagcgtcagcgtgacgccagccagggaggactgaatgagacgaccgcccggaaccgtcccgatgatgtagcggcctttcgacttcgtgatcgtgatctgagtgaagccggaggcgcggttcatgcggagaacgacgcggccatgagcgttcaggacggcgagaatggaatcagtcttcggatggttcattgtgtagctccttcgtttgttggtatggggacagtatgccactatcccgctgtgttgttttagcaaaacgtgctattccggaacgcaggtcgcgtaatcctggctgatgtagatcgtgcgctgaacgcgaggttcgagatcaccgagttcctggatggtaacatcgttgcttcctacccggcacggaaccgatccgaaaataaactcgccagtctgcttgtcgttgatttgccatacattaccgccttcctttttgacaaccaggaaaggcgcactgtctgcactgaactcttccgggccacgaccgtagtaatgcgtgatcgcagctttggccgcagcgctgaaggcatcggtaacgtcattggtcgccttgtctcggatggccttgatacgttcttcaggcgatccgatgatgtaggaaaagctgttcgaaatggtaactgttcgcattatattttaacctcgttttggtggatgaagtcggcgacgtaatggcattcgatcgggttctcgatacccgccagcacctcgcaagacccgttattcagtagctggcaatgctggcactccgcaccgccaacactggcaatgacaatggcgatcccgttgcatgaaccgccgaacattcgatgagggaagtggtaagcatcgcaggtgcaaaccacctccccggcccgccgtttcctcatacctggcccttctcgatgcagaaaacccaatcacgagcgtcaaccgcaaagcgtgcaacgccgtcgagcaccacgaagacagtaaacccgttgacgccgcgacccttctcgatatcggtcacggtgcggaacagatcgcttgcgccatattgaattttatccccgacgactacatccgcaaatgctttcatggttaatctcctgactggtttcgatgggttaactataccaggcctcgcggcccggcgtttagcaattcgtgcttatttcactgctttcttcgctgccttgtacgcctctttgaaagccggaacatcttcgaccggaatccagaagccggagccatagccatcgtcatagcaagggcattggtcgcagtagtcgccccaggttttctcttctccgccgacagagaatccagtgggcattttgcataacgcttcctcaaccgcttcgatcttgtcggcgtcgctatccatgataacgaagttccacttgccgttatactcgctgcccaggttgattgattcgcgttgaagtttcatagctttagcccctttggctcaattcgtttcgttgaagtcatcatagcaaagccgatcggatggattttaacaaaaaatgctattcctgcgattgctgattattccaccgattcggaatagtggaatagatggtgattgcacctgattccctggtgattagttttgacgaatcatgattgcttttgattgtttcattttgtgcaacgattttgtgagtgtttcaggatttgcaacgaattgcataaa

SEQ ID NO: 2 - DNA, 49606 bp, Klebsiella phage
  source 1..49606: mol_type = genomic DNA
gatgtatgcaccatgcacgcaatttgccgatcgaagccagcaaaagcgccatgtgtgtttcgccaacatttacgtcgtgtgggagtgtgggggaggaataatcttacctaaaatttgcgcaaaaattgaccaatataagcccatatatagatagtaagtatatgataaataataataatattattattactctttatctttatatatgtttggtaagatttctccgggtaggttatggattcctcttgcgcaagccataatttttagatgttccgccgcgaaaaaatgtacatagggatatataggtgatgacagcaaatcttcccaaacacgctgaaaccctttgacggcgcggcctgcggcctgtattatcatcttccgaaacattaccaaacgccgtaaatgtgggggaaacacaaatgcaatacaaaggctatgagttcgaagaagtcgacgtgtccgagtggatgaagtacgacgcagaaaagcaagccgcttaccatgaatggctgcaatccataacgtttggtgacaccaccaggccagccggacggagccaggaagccgcgaagccggaaggtacattcactggcaaccgctcttccgagatccggcgcatgttcctggatggcgggcggcgtatccagatgacggcggaggagttcgtggagaagttcggcgttaatccggtcgacaaccacttccgcaggccgttgctgaaacttctggagccgggcgaggtgttgcgagtgagcctgggggcggggttaatctccgtctttaccgagttcgacgcaatgactggctcaaacctggaggctgaggcatacaggcggcagggcgctatctctgagcgggagcggattaagggtttagtggccgctcttgccgtagacttcgccgggaatgctctgaccggaatttacaaggcgaacttgttcgcggctatcgatcttggattgaccgccagcgatatcagccaggaggcaaccaccacgaaatagcactttttgctaaaacccggtcagggagattgggtattatctcttcatcgacaacgagcgaggaaagcgaaatgattactctgattacctgggaacacgaaaacagcaagcctgaagtgcgcgagttcgagaccgtggcggcgtgctacaacctggcggcaaacggtggcttttacatggcgcagattgttaacgagttcggggttgtcgactatgaattttaaggcgagcgatgtaaaacctggcgcggtctacggatcgcgcctcaatagccgcctttggcgctgggacggcgaaaccatgtggactaaaggcgagggcgatgttatctggcgtgagtgcggctggccccaccccacaatgagccgccttgatatcgcttattacctttcagtcggcgatatgcacgaggtggaaagatagcactttttgctaaaacgccgatggcgagatccggtattatttacccaccgacaacgaactgaggtgatgaagatggataaggttatcaagatgagcgaagttaagccgggcatgatggtcaagtttgctggcaagtttcgcctggttctcgcagcagatcgcaaggcgaacattctcactattcgcgttaatggaaaggcccaactcttcgcgccgcagtccgacattgaagttgaagttcgaatcaagtaagcgatcggggtggcgacgccgccccaccatcaacacggctcaagccaggaggaatggccatgccacgattttcagcaacaaccaaacttcgcaccttcgccgggatgccgatcccatactcatcaaccaaagccgtccagggcagcgagcacggcgtatatttccactggttaggtaagtggagattcaccgtcattcgcggcttttacgtgacctgcgatcgcgtggatattgccgaccattccggcggaaaccaggttcacgagttcaataggcgcgaatagcactttttgttaaaacacgatcggggtggcttgctatagtaaccccatcgaaacgaacaacggagcaccacaatgaaatctcgcgaatacctcaacacccttaatggcctgatttactggctggaagatgacgcagtgatgatgcgcaagcgcgaaggcacgatctcgaagaagtcgaacatgacggctgaaatcttcttctctatggtcggcaacgatacgctgattctggttgagccggagccggagcaaaagagcatgaccatgaacgaattctctaacttcctggctggcatcgacaaaagcaccacgaccgcaaccgcacagacggccattcagggcggggccacccacattgccatcgacggtaacggcgacgtcttcgcattcaagatgcgcccgcgccactgtctgccggatgacggcgacgcgaatgactacctgggtgaatggcttcgcgggtcggagcagtacggccacattgcgcgaacagtctgcttcctgggcaacactggccgcgagcatcgcaactggcgggaactctgcttccagatcccacggcaatagcactttttgctaaaactcaaacggggtgatgcgctatcattaccccatcgaaacagaggagcataaacatgatcggcaaccaaaacaacccactcaatgcagcctttcaccgtcgcgcggtagagcaacacttccacgcgctgaaggtagtgtgcaacgagatgaatcttatgcttgacctgccgtcatgggatgcgcaactggaagattactatgatggcctgcgcgctaaacgggatggcatcattacccgcctgcgcctggctggaatgttcttataggagaaacaaaaatgcaacaattcgaatctcgcggcaagacctacaacctgcctgacactgcaacccatgccgcacctggtgcatgcgtcggactgtactttaaggatggcgatagctggtacttcatgggtgatgtggttggtgacgtcccgccgaagaaatgcggcttgctcctgggcttttacgatcacgacgttgtggagtttaaacctaaacgcgtaccgttcgcattctggaacaaaatcaaaggggcgctgttcaaatgagcgatccgaaactgcaaacggtctgttaccgcgattctgatggcgatgaattggtcgtgtcgccgttcagtggtggcgctgctggcgtagaactcatggcgacccacgatagcggttgctgcgtatttgacgacccgaaggtaatccgcgatctggctaatcagttgctggccgtcgccgatgccgtcgagaacgcacaaggagaggaagaatgaaccagttcgaatatatgcatcgcgcacataaagcgcttgccatgttcgcctttcacctggatatgaaagttatatccgtgaccattgaggccgggagcattgagatctgcggattcgttggcgattactcatgcaccagaacttacgcgttctcatcgctcgcttccctggagagtcaggcttatggcttctaaacgcaaattcaggatcgtgcgcgtggcgacgtttgacgccttcgggcgtccggcggaatggtatgcagcgcaacggcgtgttgccttcttctggtgggtgacggtcgaacacttcggccagttgtcgcaggcccgctactggctcaataaatccggcgcaccaaatcgcccggagcgcgtaatcaaggtgattgaatagcacgaattgctaaaactcgatcggggtaggctggtatagttaccccacaccaacaaacgaggttatcaccatgaaattacgttgcaccgattccaacactatcaactacacccctggctttgagtacagcgcggagctgggcgttaccgtccgcacccctcatggctcgatcggctgtgatgtggttcatggtaacaacacctggttctttttcaacaaatcaaccctcaacgccgaacgccgtaatggttcggtcgtggcaacctttaaggtgatcgaataatgaccaaagaaatcaaatccggcggaaaggtagttgccaccatatcgcagcgcccggttgtggcgtttcagattaacatccacagcaccagcgatgcaaaaaccgtcgatgtgccagtgtgggccaatacgattgccgttgacgaagacggcgcgatttgggcgtatgagtcagtcgccgaagatgttcgcattatcggcgtaaacaaagcctgggtagactgcgggcgctgcgatgcgaagatgcaggaaattggagaaatggagccgttccctgactggaaagaatcgcaaatcgaccttcgcaccatgcaatagcactttttggtaaatgcccggtcaacggatcgggcataattatcccacaccaaacaacggagattaaccatgaaacaggtcgtcaaaaacgcagttgtcgccatcgtcggaaccaacttcgaaggcaagaaaagccgcattcaccttttgcacgtaggcaatgatggaaaaatgcgcggagctttccattacggcgagcgaggggagcaccttcacagtgacttgcattccgtccttccgctaaccactttcaacgagtggcgaacccatcgggaatggcagccggaataccattacgaggggttgattgtcgaatcgttcgttgccgacccaacgaaacttaccgcccgcgactataagcgcatggcccgcaaggctcacaaactcatgaagcgcacgccgaaaatccacgtctggcacaccttcgccaaccaactgtaaggccaggtgtgatggaaaccgtaaccgtaatttgcactcatgcgagctacgcgccgatggccccattcttcaccgtcggcaaggagtataacgccagtttcggccccggcctggatgaggtctggattttgcaggacgacaagaaaacaacggagttgggcgaaaactggttagcgtgccgcatgccggatgagaagatcgcgatgtttcttaaccgaccatatgaaaacaacgttttatttgaggtgaaactatgagcaagaaaatgattgcactgtattggattcttttcctgggtggcctggtggttgccaaagaagatggctggcaaatgatcggaatgatgatggtcatcattggggtaagccgcctctctgagattaacggattccgccgtggtcgccgggccgcattcactggcgataaagaatagcactttttgttaaacctgccgtaacgtcatttggtaaagtggcgttactgaagcgaaacaaaccaatcaggagttacaccatgaatgaccacatcatcgacctgttaagcatgctggctgaggataccgtagccatcatcgagcttgaggacggcaccgaaattcagatcgaggttcccagcgtgcgattctgcgtatccggcggcgagcattccgagcgctccaccgaaacggatcttgattacgcgacccacttactctgcctgaatgcgatcgaggagatccgctaatgaacacaatcaaactgaaatgcgtgtccgtcgagtcgctcgttagcatttcctgtaagcctggcgatatcatcaccgccagccgggataacgaatcctcatgttggcacttcgacggatactacctggatgatgatctggtggttcgcggcatcttcggtgagttcgcacggttcgaagtggcgaagcgcaagaccgatcgcaaactggtggttcgcgcaatgtgcatcatcgcccgccagtatgggtggactgacgcaggcgttaagcgcgtcggcaactacaaaaccgtcaaggagtgggcgcgggattgggccgctttctacaccgacgaaaaaggcgagcttcagcacgatatcagcgagtacctggaagattgcagccgtggcgatgccgtccgcgagttcatgcaggcagaaatcgacgccatatagcacgaattgctaaaaccgccgtcaggggatggtgcatactatccccacaccaaccaaagaggaaaaatcatgagcacctacaaattcatcctgaccccgaacgctgattctcccgctggcgtgggcgcgaaattcacaaaaggcaagcgctatgaggccgaacctttcaccaaatacaccggggattcactgtacaaaatcaccgatgacgaaggcaacatgtacgcggtaaacccgcgcaactcgcactacatcggcggcggtcagttcagcatcgagttgcaaatcaacaactgtttcgctggtggcgaactctccttcggaggtttagtgggcggcgcgatgcaatatcccatccacacttcggcgtcaatgttcggcggcatcacctccactgaatcgcccctgttctttgccgacctgaaggcccacgaacgcgataaagatcaggatctggaagccctggcagagcgcgtgctaaacatgttcgtgcgcgatgagtcacggggcgttgcgcgtggatttaagatcggcactgagaaatccgcgcacttcaaagagggcgtgaagtcggcaagcgatgcggttgcggccctgggcatgctgtcacggtctgttatcgtaggaagcgcgaaagaagcctcgctcgctgaccgggttaaagagcttgaatcagaactcaacgccgcccacaacacgatcgagaaaatccgcgaagccatgcgcacgccggaaggtgaagacgcgcagacccatgcgaaagttctccgccagatggccgacgccctggttagtttgtggcgcgacggcaaatagcactttttgctaaaacttccgcaaggccatttgatatagtggccttattgaagcgaaccaatcaggagctaaacaaatgagcattgcgtatccgaccaaagacaaatcattcctgggcctggcagttgttgagattgtcaacccggacgtgaccaactccccggatgagcctacccttgcacagtgggccggattcaaagcaggtgatcgactgaccgtcgaatgctacagtgacggcgagaagtgggagcaggtggggcgctactaccacaccgaagaattcggccaggtgctccataccgactggttcgaacttaacgaaggcgaatataaggtaatcgaagaatgaaaataaaaatgtggttcaacggctttacctacaacgttaaatttcgcgggaagttttactactggtgcgatgagggcagcaagcgctggcggattcgcccgcaccaagaaagtgcgagttatgagctaggcgttgccgagggggaagagcgcgtcaagtgggttaaactgaaagtcaaaatagcacgaattgctaaagcaaatcaggggtaagctggtatagttaccctatcgaaacgaaacggagttacagaaatgaaaatcaaaatcaccaaaatagacactcttaacggcgacggctcaatcaccctggaagaatgcggcctcaaaatcggcgaagttcttgaggtcgacggacacttcaacgacggctcctactgtgtgatcgctccgcgcaatagcgagtttatccaggctggtgacaatatcagcgtgagcaaagacgaatgcgaggttgtagaagaatgagcaacaagatttgggtgctgacatacaccattggaaccaacgaggggcgcaagtcgcgccgcctcatatgcgacaccaaagagcaggcgattatgcagcaaaccgttcttggtggcgatcttgtcgaatatttccgcaagcctgaagcgtttaaggtgaactggccggaaggcatggatatcaacggcgcgttatcgatcctgcgcgatatgcagagcaaccagaagacgtggagcgattttcaatgcctgctggcggagccggaagtgaaggcctacccgttcaccaatattcgggaacagcacgcagaatggtcggatcgccagttcggtaacgtcgggccagtcgggccgctcaaacatctggcgaaagaggcgatcgaggccgcagaagcgccggatgacattagcgagttcgccgatatcctcatgttggtatgggatgcaacccgccgcgccggattcagcgatgagcagttggctgaagcggtggcggaaaagctggatcggaacaagcgccgggcgtggggcgaggtaaaagatggcgaaccttgccaccacgtgaaaaattaacgaaatcgaataccgtttaaagcgcctgtaagccattatggcgggcgcaaatttaaggagtgcgattgtatgcctgaatactcaaaagtcgaagatatgccgattggcgcaacgattactggtatccgcatgagtgagtcggacgacgctatcgagccgctggcgttcccggttacgcaggtggaaacagatagcaaaaaagggttcatcttcatctacaaaaacttcaatagtccgctgcgtgttgaagtgttcattgctcgcggaacctgggtggaatgggagaaggccaaatgttcggactgaatgaagcgcagtacaacgcagtgaagcgcatagcaaagcagatggccgcagaaacaaaagacgccatcaagaaggacaaaaagacctacgatcaggtcgccgcgaagatgatcgataaacattgggcgcaaatcaacacgctggttactcgcggccagtttatctggatagctggctacctggaaggccgattcggtcgcagggatggcgagtatgaataaaaaacagccaaacgattcagcgacctattgacgcaatcgcgctgaccgggtaacgtgaaccacgtagacacaagaggcggtaaacatccgcaagtctggccccgcttaggggcatttacaaaggggttatgatgcaatataaggtcatactcacggcaagaaaaatgggcggcttttgcaagccctgcattcaagagttaagcatgacgattgaggcgaacgacaccgccgacgcggtggagaaagcaaaaaagcaatccggcgtcaatctggatacgcataaaatcaacatcaactacataagggaagcaacacaatgataactctgattgtcgcgttaattatgctggtcataggcttctatgcaggcgccttccacattgtcgaatggctgtccaagcgcgtgcatgaaggcactttcgccgcgatgctgtacaacaagaaaacgaaacgctgggagaaaattggcgatcctggaggtatcgcaaaacgaattgattcttcgccgcttccgtatgttgactgcgatccgtttgtaaagctacagaagacgctgaataggcgaaacaaactgatatgacaaaagaacccgcttcggcgggtttttttatgccagcgatctgatatactcgcaaatcaacatagaaggaggatagaaaatgtctgaagaacgtagaaaacgcgtaacgaaatcgcactttgaaggcaactttaaggcgctatatgagaaggagttcggtgtagtgttggggcgcacggcagagatgacgccggaacaattttttgatatcgcaaagcgttactttcagtgggccgaagagaacgcaatcaaggctgcggaaacggcaacattccagggcgacgttaacgagtggggtgtgaacaagccgcgcatttttacgataacagggttaagcctgttttgcggcgtgaaccagtcaacgcttgggcgctaccgtcacgatcccaactatgctcccgtcatggagttcatcgactccgtgatttatgagcagaaattccagcttgctgccgtcggcatgattaacgcttctttcgtcggtaaagagatggggatcgataagccgccagtgctgaacatcgacgctatcgccggggataagaacgagatcaccgaagagaagttagagaaggcagtgaccaatattcttgataagctgtaagggtcagatatgaacgaaatgatcatttgggaagacctgtcgccagccgataagctagcaattaaggcgctgagtacgcgcaacttttcgctattcctgaagatttggttccagatcatccagggcgaaaagctaatgtggaactggcatcactcctacttttgccacacggttgatgaaattatcgccgggaagcgcaagagcacgatcgttaacgttgcgccaggctccacgaagacggaggtgttttcaatccacctcgcgccgtatgcgtatcttaaatgccggaaggttcgcaaccttcagatctcgcagggtgacgccctgtcaaaaggcaactcggatcgcgtgattaagatcttctcatcaagcgagtggcaggagctatggccatcaaagttcggtcgtaagcagatcgatgaatttcaggtgatggatgataacgaccgcgtaaggctggaaatggtctcccgttcgtctggcggtcagatcgtcggtaagcgtggcgggtacatgacgccggggtttagcggccttatcgcgctggatgatatcgacaagccggatgatatgttctcgaaggtgaagcgtgagaaaaaccacgtactactgaaaaacaccattcgatcccgtagagcgaagaagaagaagggcgacgaaacgccaatcctttccgtgcagcagcgattgcacgcgcaggatgccacctggttcatgatgagcggagggatggccatcgacttcgatcgcattgttattccggcgatggtaacgcgggaatatggcgaatcactccctgactggttgcgacctgagttcgaacgcgacgtgctttccggcccgtcggtggtcattgacggcgtggaatactggtcattttgggaggagaacgaatcaatcgagaacctggttgcgctacgcgaagccgatctttacacgttcctttcgcagtatcagcaggagccaatcgcccttggtggtaacgtgttcaagtcggagtggtggcgctattacggcgattccgacaaggcgcacgagccgcgcccggacaagttcgaatatacgttcatcacggcggacaccgcgcagaaggtcaaggagctaaacgactactctgtaatgtgctattggggcaagtatcgggatcgcgtctacttcattgacggaattcgcggaaaatgggaagcgccagatctccgcgttcagaccgaagcattcatcaagcagtgctggcgtcggaacaaggagtgcggaaaccttcgccggatctacattgaagacaaggcgagcggtactggtctaatccaggatttaacgaaggctgtaaacggcatgggcgagatcgtcccggtgcagcgcgataaagataaggtcactcgcgctatggatgcacaaccaatcatcaagggtgggcgtgtcgtgctgccggacaatcatccattcgttgcagagcttgaggcggagatgagcgcgtttacatatgacgattctcatccacacgatgatatttgcgacaacgtgtttgacgccgcaaacctggaaatgaacctgagcgacgatccggttgagcgaatgaaacgccttgcgggattgaaaaagctgggtcgctaatacataatgtgggcctgacggcccacacttaaacaaggttgaaatatgaataacattaagatggacgactataatcaaatctttaatggtggcgctggttatgcgtcaaccctcgcgtctatcgcggcgagatttggaacaatgtcgcaggttgaagagttctatcatgaaaacggcatggcgaagaaaatcgttgacgtgatcccggaagagatggtcgctccaggcttccagctaaacggcatttcagataacaccaagtttcaatcagaatgggacgggttaaatctggagccgcaaatcaccgatgctctttgctgggcgcggctgtatggtggctcctacgtcctggcgatggttaacgatggtcgcgcgttgacttcggcagcgaagcggggtaagccgctagaatcgatcgttgtttacgaccatgattccgtttccgtcgcagaggaggaaaccagcccacgaagcccgcgattcggaaagcctaaaatgtacgaggtgaagccgctaaacggcgggcaaccgttcaaggtgcattatacccgtatgcactacatcgacggagagcgagtaaccaacaaggtgcgccagctaaataatggcgctggtggttcggtgctgaataagtcgatcattgaagcgattcttgactatgactattcagaatatctggcaacgcagctactgaagcgcaagcagcagggcgtatggaaggcgaaaggcctggcgctaatctgcgacgacaaagaaggcgagtacgccgcccggttgcgcatggcgcaggttgacgctaattccggcgtcggaaacacgatcggcattgatgctaccgatgaagagtacaccgttatcaactccgatattacaggcatcccggaattcctttcggcgaagatggatcggattgtcgcgctgtctggcattcatgagatcgtgctaaaaaacaaaaatacgggtggcgtaagcgcaagccagaacacggcgctacagacgttctacaaactggttgaccgcaagcgcaatgacgattacaagccgctgttagaattcctgttacagttcatcgtaactgaggaggaatacagcgtcgagttcgagccgttgtcgctgcctaccgatgcggagaaagcggatatcttccagaagaacgccaacgcggctcgcggcctcgttaccgaccaggttattgacgccactgaggcgcgtgatactctgtcggcgttgattccagaactgaagctaaaaggcaacgcgccgaaacagaaaaaacttccggatcgcgccgctggttcaggcagcacgcaaagcgcagagatcttaaacaacacggaggcggatgatgaaagttaacggcagaatcccaaactggcgttatcctgaagcaagcgaacgggagctatcccgttccatgcaggacgcggtgacagaactcgttgtagaaatgcgggatcgcttagaccgcctgaaatttgacgccacggcggaggaaatcagccaggcggaagacgatatcagcgaatcggccatcgtgttcttttccgccgtaattgcggcgctcgcctccatcgggttgactatctatagattcaactcgaaacagtggcttgcaattgcgatcgcggctggcgggcggaacaacgaatcagttatgcgccttaaagaattcggtgctggtgggtatgaagactggtatcaagattcgttgaggaagtgggaagataccgccgaagcgtcaatcaggaaactagcaagcgatatcgtagccgactggacaacgaaagttagaaccgccaacaacattggcaagtctcgccagcagatcgatgaaatcatcgaaggcaggtacgccatttatggtagttggtcgcgcaaccgggcaagcggaatcatcggaacttttaacagtatgttgatgatgcagcgcctaaaagatgctaaagtatcgcattacttttggttcgggatgatggacgaccgcgagcgcgaaagccatatcaagctagaaggtaagcgacgccctgttaatggtgacggcattttccccggcgaagaatatcaatgcagatgctgggcgtgccctgacttcgaaaatattgagggttagcatggattggaataatgcattcacctatgatgatggattacttagatggaggggtaagccttctaataacgttgaggctggagatgttgcgggatgttttgatggtgatggatacagagttgttacagtaaagccaaagcagtacaagcaacatcgaattgtatgggagatgcataacgggccaatccccgaaggaatggagatcgatcatgaaaatcacgtaaaaagcgataacagaatcgagaacctgagacttgtgacaacaaagcagaataagcgcaattacacaaggctaaggaataacacttccggggtaactggcgtcagttggcacaaatcttacgaaaagtggcaagtgacaatttacgacaatcacggaaagcgagtgtaccttggaaggttttctgactttgacgaggcggttaaggttcgcagagaagcagaaaagttatataattaccaccctaatcacggagataaaaaatgaaaagagttcaaaggttcgacacggtaaagatgaaggccagattcgatgagaacggctttctggttgatactccgatcgtggcgcgtatcggtgcgcagacgtaccagacgccaaccgggccgcgagtcgagttccgcccgcgttctgaggtgttcgatgctgaatcgctggcttcataccagggtaagccgatcactttgggtcataagatggtgaacgcgcagaacgcaaaaggcctggtcgttggctcgtgctccggcgctggcaaagaagaggggatcggcgttcttgttccggtgatgatttacgacggcgagtcaatcgagcaagccaaaaagcgcgtagcggctgagttatccgtgggctacacttcggtcgatatcgatcgcaaaggttggggtaataacgcaactggcgaatattatttcgatgaagaccttccggaaaacttcgaagagatgaaaaatgattccgtctctgattgggttcgctttgatgcagtgcaaacgaagattcgcgtaaatcatgtggcgcttgtgttccgtgggcgtgccgggattgcgaaattaaatcttgatagcgaacaagaattcccctatgatgacgactcaaaccacaaaggagcaaaaacaatgatcattaaaattgacggcgtagatgttgaagtggccgataacgtaggcgcttacattgccaaactagacgcgcaagttgcatcggcaaccagtcaggtaacgagcatcaccgcagagcgcgacgcacttcaaaccaaagttgatggcattgaagatgaagtttccgcccgcgttgctaaaatcaaagccgacgaagacgcaaaacagaaagttatcgcggttgtttctgccgctggcgtcaagtgcgacggcctggatgttaaggcaatgaaagttgcttacatcaaagaggtcgacggtcgtgatctgtctgataaagaagattcgtacatcgacgcttcttttgactttatcgccaactctgataagatggctggcaaccgctcgaaagtctttggtaagaaagaagacggcgagcagaaagataaaggcggcttaccgaaacttgacggcaccgaaatcatcgatccgcaggcaaaattccgccgctaataatttgcggtcttcgggccgctaccagaccaaataaacaggagattcaaaatggcacagattccagcttcttattcccgcaagcgcgatattgctgtagcggggcagatcgctgatacgtcgctttataatatcgatggcacttgcgttgctgaaggcgatatcaaagctggcgtactggtggcttccactggcaaagtttccaatggccacaaggtagttaagccagcgacatcagcgagcgacgtcattgtaggcattgcgcagttctcgcaagcctactcgcctgaaggcaagtatgacgatgatggcgcggttaacgttatgactcatggccgcatttgggcgatcgctgacgccactgttactgaagcagattgcaaatttgatactttcgtcacctttaccgcaaccggaaccgttgcgaaaggtagtgcaggggttatcaaaactggctacaaacacactggcgaatacaccaagaacgcagatggcactgttctggtgaaagttcaggtgcttcagggtgcggtggctccgtcagttggggtttaacaaataaggggcttcggccccatttttgcaccagaaaaaagctttgacggtttaacgattcgtgatattcttcatctcgttaagctaaatacacaaacaggagttttcagatgactatgaaattagatgcattcgaacagagtgccattaaggtcgcaatgcaggccatgggcgtagatgccgcaaaactggatgcttacggtatctggactgttaagcagatgactcaattactgaatcgccagtatgagcaggcatacccgcagaccagcgcacttgagcttttcccggttactaccgagatctcgcctaccgcccgccgatttgagtggctagaattcgatggcgtaacttctgcgaaaattatcgccgattacaccgacgatcttccgacagttgaagcgatggcaaaagagaagtcagggaaagttttccgcctgggtaacgcgtggtttatttccatcgacgaaattaaaactggcgcggcgctgggttccagcctgagcgatcgcaaagcaactctggcccgcgaaggtcacgagacgctcgtaaacgatttggtgttcaaaggctccgctcctcacggcatcgtgagcattttcgaccacccgaacattaaccgcaagaccgccggcgctaaatggggcaatgatgcagcggcggctgaaaaggctttcgaagatatggaagatctgcttaacatgatcgaagaaaccacgctgggccgccatcacgctaccaatatcgtgattccgccttctaagcgtcgtcttctgacgaaaaaaatgcctgacactagcggcgactcttatctgacctggttcaccaagaaccacccggacatcaccattacggcgatggctgagctggaagatattgacggcgcaggcaccaaaggcgtgctggcatacgaaaaagaccctatgaacatgagcatcgagatccctgagcggttcaacatgctgccgatgcagccgaaagacctgcatttcaaagttccgtgcacctccaaatgcactggtctcatcgtgtaccgcccgctgactattgcgatcctcaccgggatttaataaaaagcgccttcgggcgcttttttattgcattgcattctgcaatgtgctttaatttgaaacctaaagtaaaccaatggagcattaacaatggccagtaaaaaagaaaccgtagaaaccgcagaaaccgcagaaatcaccagcgcagaacagacgccgcaggttgttcaactgcaaaacgttggtgcatgtgcaattcgctataaaggcaaaaattacgtctatgatcaggttttcgaagtgccagaaagcgagatcgaccgcttccgccacgaaatcttcaaaggccgcgtcgagttctacgacaatccgaaacgcacgcgcgaatacatcgcagcggtgaaggcgacagcgaaagagatcgtgcagcctaaaagcgcggagtaaaataaaccaataaagggcgctacggcgtccttttttatatcaggagatcgaccatgaattacacgattaaagatgtgatcgacaagatgcgcagccttgcacctccgcttaaaaaagtacccgacgaactgctaaccgcatgggtcgtgcttgctgaggagttcgtttgcaaatcaaggttcggggattccattgttacagcgatcgcacttatgaccatgcacctaatgtttttggatggcgcaatgaagcaagaaggcgaaagcctggagtcttacacgcagcgagtggcatcgttcaccctgaccggggagttttcccaaaccttcgatcgcgtgtcggcgtcaagcgataacgaaatgctttctacgccgtggggcaaaatgtactggcgtatgctcaagatgcgcggcggcggcttcggccttcttaccgccgggaacgtgcgccgctgcggaattggcgggtgatcgctatgaactacaaacaaatccaggcacgcgcaagcgcgggcattaagtttttcagtgacgctgacggcgtattcaacaagtacacgaaaggcgctggcggcggaatcgatccggaaaccggggaagatatcattcctggtgaggtggtaacgacaatcaagggcgcgatcagggatgtaaatgaccgtgacattaacggcgaaaccatcctagctggcgacaagcgcggttttttcactcacgatgtgccaatcatggagggtgacgaaatcgaagtagacggagagcgctaccgcgtggttaatgcccgtccggtaaaaccaacgggaaccgttgtcgcctaccgtccagttttacgcagggtggcgacttatggctaattatacgatccgggagttcacaggggctattgatgcatggtgtaaggccgctggtgatgcgctggaggacgttgtaaggtttacgtgtgaagatattcaccgcgaccttgtaatgcgttctccggttgatacagggcgcttccgtggtaactggcaaatcacctttaatcgcgccccgctttacgcgattaacgcatatgaccaaactggcgaaaagacgatccagaacggtaaagccaacattgcactatacgcaaaaggggccgggatcacttcgatctggttcagtaacatgctaatctatgcgaacgcgctggaatacggccattcaaagcaggctcccaatggcgttatgggcgttgttgcgatccggttgggcgtttatgttactgaggcaatcaagcgagcgagggcgaaaaatgcattatgatatggcgttaaaatgcaaggcggcagtggctaaatttgccgccgagaacgggttgagggtcgcgggggataacgttgactttatcccaccgagaggcggggaaacctaccttaaagtctcctacgtagaggcggattcaagatcggttgacctgtcaagaaaatgccgagtctatctggcgatggttcagattgacgttatctttaagcctgggatcggaaccgaccgcgcgaggattatcgcccaacgcgttgcaaaatccttccctgaaggcaaggttgttgatcgtgacagtaagttatatgtgagcgagtgggcggaggtacacagcgtgcagaagcatgaggctggttggttctttccggttcggttcacagtaagatgcgatagcgtggaggaaaacggttatccatcaacctgaccgatcttagatgtgcttataatttcttgccagcctggaaatatataggcataatggcgttgttaaactttcatcaaaacaggagtattcaacatgcatttaccaaacggtgcaaaggtcttctttgagaagaatcgcggtgcggatgttccgtttaccgcaatgaccaacgacgcgaaaaacccaaaaatcacagtggcggacggcaagctgaaggtgaaagatattgtgatcttcaccgattgcacctggggcgactttgtaaataaagtggcccgcgtcaagtcggtatcggctggtgtggcaacgctggaagagttcgacacctccgacactaacaagtatcctggcggcgcggccactggtaacgtgagcgtgatctctgattgggtcgaattgccttgcattcaggatttaggcaaagacggcaacgaacagcagttctataactatcagtgcttgagcgatgagcgcgaacaatccgaacctacttacaagtcggcggttacgcttaactacacgtttgcgcacgagtacgataacgcgatctacccgattttgcgttcagcagacgccagcaagcaggcgaaagcgatgtacatgtatatcccgcgagcttctgaggttcgctactggtctggaattgcatctttcgatgacattccatccacagcggttaacgagatggagacggtaacgcttaacattgcgcttaaaggcgctcacgtcttccttccggttgtcgcgtaattaaatggcggggcttgtgcctcgccttttttttgtgcataatagcgaataacacaaaccaatcaggagttaacaaaatggctaaattcaaaattcaaattggcggcaacctcccctctttcaaactgcccgtaaccttcacttgcccggatggcaaagaagcgaccatcaccatgaccgtaaaacatcgctcaacagatgagatgaaagacttttatgagagcgaagataaagcgccaaagggtaacgccgagtttatccgctttatggcagaaggctgggatcttgatgacgaattcaacgacgaaaacatttcctggctttgcgctcacttcccggcgtttgtcatggcactgccacaaacttacatggccgcgcttgcgggccatcgtgcaaaagtttaaggcgggctgtttatctcacgcttcagcctgaactaaccgatcgccagcttgcggagtacggtttaaggcgatcggactatgaagcagatcttgaaacgatctattttgatgagcagaccgcccaaagctggcagctattccaggccatgcaaacgcagtggcgaatcggaatgaatggcccgacggggcttgactataatacgttgcctctgctgttcgatttgtataaaatcgacaatcgagaagcggcattacttgacttgcaaatcctggagggtgaatacctgaaggagatttacaagaaatccaaataagcgcctacgggcgcttttttcatatgggggctaaacatggctgataaagtagctgggttgacgtttggcgttgacgtttcgcaggttgataaggcggtacgctcactcgcagaactgaaaaaccaaagccagcaaacgggcgctggcctacagtcacttgcggacgctgaaaggcgagccacggcgcagaccgaggaaatgaaccgcgcattgcagcgccagaagcaagagactgacaaatcaaaaaccagctttagcaggattgcgagcgccatcgatcccacgatcgcaaaaatggccaacttgcgcaaagcgactgaagaacttgataaagcgtgggcgcttgggcttgttccggacaaggaatttttccgcctgggcgctatcatcgaatctactaccaaccaactccggcggcagcaggcggcgctaaccgaagaaggtcgcgcagcaatcacagaggcggaggcaaagcagaaggcggcaaacgccgggcgtgattttgtcgccagtctgaaacagcaggctgactccatcgggaaaacacgcgccgagctgcttgaaatgaaggcggcgcaattgggcgtatctgcggaagcggccccgctcattaacgcgctgaaacagcaagagcaggcattaaagaaacagcaaaacgctatgggccttgctggcatttctgccgggcaatataaaatggccatgcgccagttaccgatgcagatcactgacattgtaacgtcgcttgcttcaggtatgccaatctggctggttgcggtgcagcagggcgggcaaatcaaggatagcttcggcggcttgagcaatacgtttaaggtgttgttgagctacatcaacccgctaacggttggcgctgcgtcgttgggtatcgcgctggcagcaatcgctaaagctggttatgactcctggaaagcgcaacgagaactggcgaatgcgctggtgctgactggtggctatgctgcgacaaccaccgggcagatcacagccttaaccgaagagattaacaaaaactcatcggccacgattggcagcattcaggaaatcgcaacatcgctcgccagttctggtaagtacaccatcaaccagattaagcagatcacgaagactacggcggaatggtcggcgcagactggtgaaagcgagaagacgatcacagggtattttgatgccatcgtaaaagaccctgttaaggggcttgccgatctgaatgagcagtttaatttcctgactgaagggcagctaacctacatcgaatctttgcgtaaaaccaaaggcgagacggcagcagcagatgcggcgacaaaactgtttgctgaaactatggataagcgccttaaagatatcgcagacagcgcaactccgctcgaaacgatgtggacggatattaaaaaatgggccgctgactcatggaaatgggtaggcgatcacacggttggggcgctaaaccttatcgttgatacagtttccgcgatcattaacacgatcagaaaattgattgccgatggcgacgccatgatcgcgcagttcatcgttgacgctggccgacagctacagaaaattcccggcatgggagacttcgggaatgactttctggcgcagcaggagcagctaatcaaggactcgaaagcgaaatccgacacgcttgcaaaaaccattgcggaacagcaagcaaggatcgccaaaggagagatggggtacattgacgcagcgaaggataaaaccctttccggtgggtacagcagcaaaacgaaggatcgcgtaaatcaggaagaaaaagatatcctgaaaaaccgcaacgccaggaagcagcaggtagacgcgggcgttaaaattgatgagcagtatcaggctgaactgctatcgctacaggcgcagctaaaggttttgcagcagcacaaagggcttgacgacaagatcagccagcagcgcaaggactacttcgagacggttgctaaattccaggttttggaagaggcaagccagaagcgaaaactgacccaaagcgaacagcagatgctggcgaacaaaaagaatatcctgtacatggcggaacaaaaggccatcgtgggagatcagattgttcagcagcagcgactgaacgccttgcttgacaagtctaccaagtatcaaaaccagatggcggagaaaaccaaagcgctacaggataccgccggaatgggtagcaaggagcaggagagataccgggccaatgcgcagatggcggctgactggaaaaacaacggcggatctttaagtgaccctggatttaaagcgatgcaggccgcaagcgataaattctacgcacagcaagatgcgcaaatgatgaactggaaggccgggtttactcatgcgtgggctgacattggcgacgaagttaatgacgtatacaccaacatcggggatattactaaaaacgcatttaacggcatggcgagcgtgctgactgattttgttatgactggtaaggccagctttagcgacttcgcaagaagcgttatcggtgacattaccaacatgcttatcaagatggcgctgtttaactcgctttctgccgcgtttggtggtggcggtacgttcagcttcgccaacatgttcagcaaaggattttctggcggcggttacactggcgacggcgggaagtatgagtcaaaaggcgttgttcacggcggggaattcgtattcaccaaagaggcaacgcaaaggctaggcccggaaaacctgtaccgactcatgcgcggctatgcaagtggcggcctggttggtggtaacgcaagttcaggatctggagtaaccaacggcggcaatgttgcggcgtcggctgcgatggtgttcactatcggtgacattaacattacgatgggttccggtcaggatagtaaggggatggaacagggcgtaaggcagatcgtcaacgatatgttcaccgaggcattgagccaaaacgggcgcattgcgaagttcgtcaatgagaaaacgaggaggtagtagtggattcctttaaatggtgtacacaaattcaaggaggggcggcgaaggtcgccatctccaacaacattcgatcgattgttttcggaaacggctacatccaaacggcgtcgagcggcattaacacaaagcgccggacggttccgatcgtttatggcggttcagattgggaggaggtttataacttctgtcaggatcacgtaaccaagccgtttgtatggaaggctccggatggaagaatgggcgtgttcgtcgtaactgccgactccgttaaccttgcgccgcagggtggcggggtgtttgaggtaacggctgaattcgccgaacgcttcacttcagccggataatcaaaaagcgccctttacgggtgcttttttttggcctatgatctggagtcaattagaggagggcttacgatgacagccaatgtttcaaaagagtttgcgaactgcttacaaaaacttttccccggcgagatcctgacgctgatcgatatcgacgccacaaagttcggcgggcaggtctaccgattccataacgagaacgtcgcctatacaaccgaggagcttttagcggcggtgaacggcgggacgcttcagccaaagatgatcacgtttcgcggcgagcagtacggcccgcgcccgttcggcctgggcgggatcgcaatgtcgagtgatggcacggtggaaaagccaacgctgacggttagcaatattgatgcgcaagcgagtgctcttattcgcgcctacaacggcctcatgcaagccaaagttacggtatgggttttggtcaaggatttgttaaacgtcgacggaagcgttaaagacggcgattttaggcgattcatttactacatcgagcgcccaaaacaggtagacccgcaaaaggcaacgttcgaattaacatccgtatttgatatggacggattaatgatcccggcacgcctaacgcaaaccgtttgctattgggcgcagcgtgggtggtacaagtctggcaaaggctgcgactacaacgggcagaacggatatttcgacaagttaggaaacagggttgacgatccgtcgcaggatgtttgcggcggtctggtttcttcttgcaggcttcgttttggcaatgaaccgttgagtttcggcggttgtgcgacagcaactttgaagagtggtagctaatatgttgactccgaaaattaaaatgcagatcatgcagcacgcgaaggaagtctacccgcacgaatgcgccgggctggtaacgcaaaaatcacgcgtgcaaaaatatcaccgactagacaacgtttctccggatcctgagaacgaatcaatgcctgacgaaacgcagtatgcgctggcggcgatggatggcgaaccgatcgccttcgttcattcccacactggcgatggggcaaccacgaccccaagcgccactgatttatgcttctgtgatgagtctggcttgtcgtgggttatcgtctccatcccggaaggcgatatgcgaatcattgagccgaagcgccgcccgctgattggtcgaccctgggcgctgggggcttacgattgctatggccttattatggattttcacaagcgccacggcgtcacgctaaaagatcggcgggttccgttcgaatggtggaagccggaatacaaagagaatctttaccaggactactggcaagaggacgggttcattgaaaacactggcgagcctgaagttggcgatatgatcatttttcagcttcaggcggagaagtggaatcatgcggggatttacgttggaaataacaacatccttcatcacgcgtttggtaagctgtctcgccgggatatctattcaggatggtacgagcagcacaaagttttaatttgcaggcataaggagcttaaacatggcatcacatacgaagacgattaaactttctggttcccttgggcgtcggttcggcgtcttccataaacttgcggttgattcggttgctgagtgtatccgggcgctgtcttaccaggtggaagggtttaagccgttcatgcagagcaaagttggttcaaacatgcgcttcggcatcatcgcggacggaaaaccaatcagcacggacgactttgctactttctccgtggcgagggagatcagaatcatcccgatcccaagagcaagaaagaacggagggttgttgcaggtcgttatcggagcggcgattatggttgcggccttctttactggcggcggttcgctggcggctatgggcgctttttcgtcggcggcctttatggctggtggttcgatggttttaggtggcgtaatgcagatgatcgcaccgcagatgggcggcaacatgcgtgcaagcgaatcacctgagaacaagccatcttatgcgttcggcgggccgattaataccacggcggccgggtatccaatccagttgccatacggttacagattggctggcggcgcattgttcggttcgggatcttacgcagaagacaacaactaattaagccattcgctttttagcctgggggcatagcctccgggctttttgtcgtgtacaattgcgagactattaacaggaggctaaacgatgactaatatcaaggcccgcaagggtggttcaagcaagccacgtactcccgtagaaatgccagataacctgatctcaaaagataagatcaagttgttgcttgctgtttctgatggcgaagtggttaacgacttcagcatgaagcagttgcattttggcggcgtcccggttcagaacgaggatggaacattcaactatgagggcgtgattgcagagttccgccccggcacgcaaacgcaggactacattcagggcttcagcgagtcaagtgctgaattccaggttgctcgtgaagtcactcacaacacgccttatacgcttaccgtatcgaacaaaaatctttctgctattcgctttcgcctgttatggccgcgcgtgctgactcaaaaagataacggcgatatggtcggatcggttgttgagtacaagatcgagatggcggtagatggtgcaagttatcagacctacctaactggcaagattgacggtaagaacacgactggcggttacgatcggagcattcgcgttaacctgccgcaaaacttcacgtcgcaggtgcttatccgagttagtcgagtaacgccggacgctgacggggtgaaagttgtcgacgctttccgggttgaatcctacgctgaagttattgatgcaaaattccgctacccgttaactgccatgctttacgttgagttcgatagcgatctgttccagaaccagatccccactatctcactcaaaaagaaatggaagattatccaggttccgagaaactacgatccgattaatcgcacgtactccggaacgtgggacggaactttcaagtgggcgtggagcaataacccggcatgggtgctttatgacctgatcatgaatcagcgctatggtttagaccagcgcgaacttggcatcccggttgataagtggtcgctgtatgaggtggcgcaatattgtgatgaacttgttcctgacaatcgcggcgggatggaaccgcgctatttaatggatgtaattgttcagtcgcaggttgaggcgttccagttggtaagggatatttgttccgcattccgtggaatgacgttctacaacggtgaaagcctatcgatcatcgtcgataagccgcgcgatcctgtgtacctgtttacggctgataacgtcgttgatggcgttttcgtccggacgttcccaagcgaaaagacgatgtacacgtcgtgcaacgtcatgttcgacgacgaagaaaaccagtacgaacaggatgttgaaccagtgttcaacccggacgcagccatgcgatttggccacaacccgaccagcattacagcgatcggatgcaccagaaggacggaggcgaaccgccgtgggcgttggattctgcaaacgaacctaagcgccacaaccgtttcgttttctactggcctggaaggtatgattccttcttgcggcgatgtaatttacgttgcagatccgcactggcaatcggcctttaacctggtgctatcaggccgcgttatggaagtgtctggcgtgcaggtgttcctggcctaccgctgcgacgcgaaggctggcgacactctgatcctgaataccgacgacggaaagcctgtgcgccgcacaatcgccagcgtttcggcggacggtaaaaccataacgctaaacgtgggatttaattttgacgttgcgcctgacagtgtattcctgattgagagcgatcagcttgcagcggaacagtatgtagtaacccggattgaaaagggtagtgatgacgacgaattcacctttgccatcacggctacgcagtacgatcctaacaagtatgacgcgatcgacaacggggtaattaccgatagccgaccaacttcggttgtagacccggattcattgggcgctccgaaagacttaacgattagctcgttttctcgcattgttcagggaatgagcgtcgaaacgatggtgatcggctggtctgctgtacagtatgccaaactgtacgaggtacaatggcgcaaggatggaggtaactggaacaacgttccgcgcactgcgacaacgcaggttgatatcgaaggcatctatgctggcgagtatcaggcccgcgttaggtgcattagcggcgggaatgtagcgtctccgtggtctgcattggctagtgcatcgctgaccgggaaagtcggagcgccaaaaggcccgattaacctttttgcgtctgacaacgagatcttcggcattcgcgttaagtgggccatgccagaaggggcggaagacacggcatacattgagctttaccagtcgcaaagcggaaccgatcaggacgcaagcctgcttacactgattccttacccggctgctgaatactggcactcaattttgcccgctggctatgtgaactggtacaaggcgagaagtgtagacaggatcggaaacgtttcaccctggactgattacgctcgcggcatgtcatctactgacgttaacgccatcacggatgtgatcctggatgagatcctcgacagcgacgcaatgaaagaacttcaggagagtgcgcaggatagcgcggcaaaactcaatgaatacgcgaacagtatcattcaaaacgcattagcgaatgatggcgatgttagaataatgagaaaggagaatggcaagaggaaagctgaaattaaacacgcagaagttctcatagcaaatgagacggaagccagggtgcagcaggttaaccagatctcggcagagttcaacgaaaacctcaatgctggattaactcaagttaatgaggcgctagccaatgaaactgaggctcgcgttacgtcggaagaggcgctttcagcaaggattggagagaactccgcagcgctagatcagaaactagactcatgggctgacgttaatggagttggctccatgtatacaatgaaacttggactaaagtacaacgggcaggaatataattccgggatggccatgcagcttacagcaagtggtggaagcgttgtttcgcaagttatgtttattgctgatagattcgctatcatccgaaatgctgagtctggagcgtacacgttgccgtttgttgtgcagaatgaccaggttttcatgaataacgcgcttattcaggacggctcgattaccaacgcgaagatcggtaacgtcattcagtcaaacaactatgtttcaggtagtcgaggatggtcaatagacaaaaacggaacctctgagttaaatgaggtaacagttagggggacaatttacgctactgacggttggtttaagggtactgtttatgcagagcatattgaaggtgacgtgatgatcgcagagtcaaacacgataccattcaagacatattcagatattgatagcggagattatgaaatactgaaaattcatggagaaaactttgataggagcatcgatacgaacctgattatacaagtgaattctacattcaggaatacttttagagtaattgttcagactccagggaagggggaaatagaattctacagtatagacactggaaatgacggaggtacaagagcatacgcgctacgtggcttcgatttgccagcggctggaagagggcaagagaataggatcatcgttagggtaactcaaagcgggaggggtagcaacataaaaacattcactccatgggttgagagagataatggaaccactggacaagaaacgtctgatggagtcatatataacaatggttttatcagagagagggcatacatatcagtatacagaaaaggaaatagaatagtagtctagtgacaaaagcgcccggctgggcgcttttttttaatatgaatcatagatgtgaaaaggggccattcggccccttttttcttttgttgtcttgatatgcttgatatgtcatatcgcaacaagtttgatgcttttaagtaatgatagttttttagtcacgcaataacattagcgggccgtgatttgtatgaatttttaacgccacattattgtaacctattgtattttataaaataattacaaagttacttattttaaacaggacgtaagttctcaagtctaacctcgactattcttgatcctacacctggtgctgtaccatattcaatataaaaatcagttgtcgtttttcctccagggatccaccgtacagttgaaacggtatcgattgttatcgatgctattttatagttttcattgactacagtaaaaggtaatggaagtctaaatattttcgtagtaccatcgccagttattgtatattccttagttgtttcagtaacatacccctgtgagttccttatttgagggtcgacaagagtagctcctccatagctaattttcccatcaccagcggagtcctggaaagaacattcgccaagcattaagttaccaatagtaccagaactaccaaaggcaatatcgtaacccgcattaccataaaaagtagttccagagatatcaggttggtagcacccagacaagtttgattgtaaatcgataccgtttccggtgctcgtctttacagtacccgtttcgttgtcagtgtacgtctgttttacactgtttgtaatactgccatctctgattttaaatcctacaaaaccagagcaatagataccgctaccacaggcatcaatagttggattgataactgagcatcttgtcagggaaccaaggctacctaccccagcacgtttgcatttccttgcagagcagttgatgatgtggcagttgttaattccattctcacccatataaaagccatcttggcaaagaactgatacacagttgataaaccgtgtattatcacatccgttcatatcacagccattatctacgcaactttcgcaataggcatttattaccacgtgatcctgacacttaccgttagcaatgccgataaagccagcgcggtatactttatctttggtcgagctacatccttgcgtttgacctaaagtatccgctctgaacttgataccgttagaacctgtatccctgatatcattgaatgcagattcatgacgcaggcagttagttacatattgcccagccgcagtttctactgcccccccggtgatgtcacgtattgttgaatttttgcagaaggtgtcttcgcagttttcaaagtacgccccgtagctgttgaaatcgcgtatatcaacgccatcaaccccagcattagaaacgccaaccgcacttatgcagcgacgtatagctgactgattagcagagtttcctctcaagcgaccttttttattatttgccttgattaatgaatcagagggcaagataaacatatgcgccgaggcattgtctttatgggtgactgtcttatagtcagctatcctgattgttgtttctgatggaacagcaattgtatctaccacacagctaacatcgacaattacaacgccagtagtttctgcggctttagcaaacgctttcgcaaaagccagagttgcatcagcacctttcgtgactttgtaatcagatattctcggagatgaattatcaatatacttttgtactgtcatatctagctgcgtgttaacagagctagctccaccaggttgtgctaacaccaacagcgttgactgttctccagcatcattgatgatctgctgaacttggtctcttgcagtctccgctgcaacctctgaattttttgccgcattttcagacgcagcagcagccgaagcacttgattccgcagcttcggagtctgccttaatttggttggcgagattttgcagcgattcgaaatcaaagttcttgaagaactcgactgcatccgcgatcacggcttcctgtgactgatagtagcgcagagtttcagcaacatcttgcgccaggccgtcaacggttagcgagtcgcttaaaaggatcgcgtagtcggtagacgctacgacagcgccgtttgtggtgatggctttaatttcagtatcgctaaccaccttgtttacgacggccatttgaatcggtgacgacaaaaacataatcgtcgcgccgggtcgaatcagcgaaagcgaagattgccattttgtgccagtcccggtaacggttccgtctgcggccatagccgctttgccttctctgtatagtgccattttaaaatcctcttatgttggttgagtaacgcagataatagcatcaatgaagcaataaaaaaaggagccttgcggcccctttggttgtcaaatcagaacgggatatcatcatcgaaatccatgccctgattaccaccaccgctttgcggcttcggttgttgttgttgcggcttcggttgctgaggctggccccacccaccctgctgattaccgccgccgctttgcgaaggctcgcgctggctgaattcgagttgcggcatgatcatttcattgtggctgtaaattgtgccgttgtgctcgcggttaacgatctgaagcgtccggcaggtgacactgatcaccttattcatttgaagcgcttcatcgtaccaattaatcatattttctttggcaaagaaaacagcgcggtagttcgtgtaaattgtttcgtcctcgccatcacgattgcggatcttcatccgctccgacaggtctacggcgtacattttccacggcccgttattattgctgccttccttgatgtacggttcttttcggattacacctgttacaacatgcattgtcattcctatggggcggtttcccgcccggttaaattagttgaaagatgaaatatcttgcgcttctggttcaggttttgattctaccttttccggctcacgtttcgcaacctcttgcggcttaccagggttaaagccgttcgccggggtgactttcagttctgcctggcgtttggtgatatcgtcttccgtcattttccattccgcaggcgttaacgtttgtttcgccatcttatagatctcccgaagcgattcgagatcttcgcacgcgtcaatgcgttttttgaagtctttcggtgtcattttcgtaatttctgcatcatcatccgcctgcttgataccgagcgctgcggccagtgcatagcggcgggcgtaagatgttgttgagccgtatgcttgttcgactgttttgctgatcggcatattgtactgaaacgccatgaactcgccgctttcatgcaaaaacatagtttcgaggtgcatcaccttttcggtgctcgtatccatcatggattgaatgaccataatcttattcttctccagcgccggggaaatcgcgtcgaggatatcaccaagattcgcataggtgttcccaagatggttgttcttcccgcttttcttcgcggccacgaagccagattttgctttgattaatgcggctgcaatggtggtgaatttttcagatgtacgcatgataaagtttccttttcctgattggtaatgcgcactatatcacaagtgcgcaccagtgtttagctatttgtgccgtatacgtccgggaacatgtatttcacaaactgcggagtaggcaaaacgacttccgccgcgtttgactcatatgatggccatgaatcatgcttcacgcattccgcatactgatgaatcacgctttgatactgcttgcgaccgatctcgatctgctggctggtcagggtgaacgccagcggagcaaacggtgattttttctcctgcgttagcagtctgacaactacagggcgtttttcgttgtaggtcttcacaaacagatcgcgctgcaatgccatcttgagatagtaacccaaattgaaggcgagtctcccgaaatcgtccggcttggaagattgcgtggttttgtagtcggtaatcaccacgacctcgaaaacttcatccgggttgaacccccactccttgatgagttcgggatcggaaaccacgtcaacatgatcgagtcgaaccttgaccttgacgccgaagatctcaccgaagattgacaattcacgctgtgcggtaggcgattcgatacatgcggcgtgtcgcgggttggccagcatcacgctgcgcatttgaacaacggcatcgaaatcaacatccttaaccagcttgcgcccggagttcatcgcggcgctttcgtcgcacatttcaatagcccaccaaacatttacgtcaatcccggcgcgatatgccatctccagaagttcagggtaatccttgttggacgtcccaatcaggccacacgctttcagcttcgcagacaatgccgacttcgacgtaatcagatctttaacctcgcccggagaagttgcccgcaggtactcgccattaaactttgccgtctcaagcatacaggtatgcgaacaggttccgaacgccagcgcggctgtttcctcacgcgacttgaatttccagtgcgccggggatgttgcgtaaatctcgccgaggcttgagccactaacgtactccgcgcaccaggaatcaggatcgtgatattgctcgttagtcaattcactgcttgtgtatgccctgaaaattgcttcagccattgatattgctccatttgtggtttcgttgcgttaagtatacgcatgacgattcccggcgcaagtcaaaaagtgctattcgcaattggtcaaaaaatgagcgaaatttacgtaagatttagtaagatacatcttacgtgatttttcctatatatttcatcgagttaatgcaaatcggtaagatggtaagatccctataggtaaatatccatgaaaaatctggcgcgaaatccagcgaaaaaagacacgtaccccggagaaatcttaccaagatgagtatagagagatagagtaataataataatattattatttatcatatacttactatctatatacggcgggtaattggttaaattttgcgcgaaatttacgtaagattcatcttactaaatcttacctaaagtggttagaccagttgcaagccactgaatttcaggcataaaaaaaggtaagactgattttctcaatcttacctaaattctggtcaatatttaatcaaagaagagatgatgccttgtataacttacgctcaaagccgagcttgaagttgtcaccgttcggaacgataacctttagatcccgatcgtcggcggccgccagcatatcccgatctccacgacggcaaactacccgcatttctcgcttaccttctccgcccttgcctttatacctgtacgccacgatctcgacatttgaaggtatgatgcaggcccaaacgtcgcacttgaacgaactggcaatattgaagtgcatcgcctcaatccaggatcgagcaaggtaaatcggcccgttaccgtcgtcgctctgattggtcactatcaccgatccgaatgtcagatctccagctaacatcttctcccggccttcctcatcaatgaacaggatattgcaatactcatcatccggcccatcttcatgcactagttgcatcgggagcgcgtgaattagctcctgcctgccgttctcgtgagtttttacgccaacctgatatgattttatatgctcattttcaatgccctcatagagcgttacaggcgtgctatcgacggcctccgttctgtttaaaactgccagcactctttcatgatctgccatcttgccgtagtcatacccgttatcacgagctacctgcttgtttctcttgaccacgtattcttgcggaaccttgccgagatagcgcccaagaatgttgatgcactcgctatacggctggccgcttaacttcattaaccagccgatccccttatcagcaccgcagccaccacagtatgcgccgccgtcgccgcgcgtttctaacttgtcagtccagcggaatcggtctttgccgccgcagttcgggcagtcctgatgcttgccgttgaagtatcgagagtggatgccgcaaatgttctgcaacgcctcgcgccacattccagccatgtacggcaaaacctctttttcatcgtaaaaatccacgtcgttacctccaaataaaaaacgcctacacgagaatgataacccggcaggcgtttagtgtttagacaaattgtgctatcggactacgcggagcatttcccggcggtcgcatcggcgcgtaactggcttgccgttgctgtcaaaccttaaatctggtcggcagaatgaggcgcggaaacctttgcaattgttccggcggtagctcttgtgtacgagataagcgccatcggctgagatcatgccgcgcttacgccactgctgaacaacctggatgctaacccccaactcttttgccgttccagcgatgccaccgaaggcatcaataacaagctccatccgcgcagtcaacccggcgcgaacctcatccttcagcacgtagtaaccagtcggtcgcttgcgtttcttcttatctttcccgcgcgatgttccgttattgccgttcaaggttcgcttatccacctttgccatttgttccataatttaaccctcatagcattttttgttaaacatgataaaatgttccctgtattatacacgcaactatgcgaatgacaaattaggattgcccatgctcacaattgaacaacaaattgaagcctacgcagacaagatcccgttaatacaaaagcggttcaccgtcggaaatatcgttccttacccttatcaggcggttgcgtatattgagaccgcgaagcggatcgcaaaatatgaacatcctttttacattaaggcttcggtttccgccgggaaaaccatcatgatcgccatgctcgcggcgcagtgcaagacaatgaacttacccatgatggttcttgctcgccaggccgagatcgtgaagcaggattccgaggagatcagtaacctcgatgttcccaactccgtttattgcgccgggttaggcacaaaggcggcatacttcccgatcgtcgtcggatctgaagggacggtggttaatggcctgtttaaaatgctgggcgactacgtgccttcagttctggccattgacgaatgccaccaggttgactggcaagatctggcggaagcgatagccaacaatgaatcgttcgagtacatgagcagaccgaaggataagccgtatcgcgtgaacggggaactggtagatgccgaccacccatacgacgaaaaattcgacgacgtagaattcggcggcggtcgcacacagtacaccatcgtcatttgtgagttaatgcggaggtgccttgagaagacagggcgagaacttcgcatcgttggctatacgggttcggagtttcgcggcgtcattccgattttacaggaagacaagagccagcctggtttttggcgcgagcagatcaccgacattaacacaaactatcttgtcgatttcggatcggttgttcccaccattttcggcgacaccgaggcggatgggttgggttacgacctttcagaatttcatggttccagtcaggacggcacgcaggattttagcgcggaagaattgcgcaagatggaaaagaaaatccatgaatccggcgaaatgacgaagctgattatgcaaaaggtcgtggagcgtgcgaaaacacgaaatggcgttctgataacttgcgctggacagcggcattgcaaggaggcggcgagctatctaccgccggacgcaacatacgcgatcatcaccgaaaagacgaattcaaagaaacgcggcgaaattttggataaggcgaatcgaggggagattaaatacatcttccaggtgatggccctaaccactggcgttaacgttccgttttgggatttttcggtgatattgcgcaagatcgggtcgcttacgttgcttattcagcttttggggcgcggtatgcgacttctgaaggactggcaaaaacagccaccttactcgtgggtgaaggaagaccatttagtttgggacttcgccgggactatggacgatttgggccagctatatttcgatccgattcttgagcaggcgcaataccaaagacgcaagagcagcaagaacggcccgaaaatttgcccggtatgcaagggagaaaatagcgagtacgcccgccgatgcatccacaaatacagcaacggtaatcgttgcgaatacttctggatctcgcagcgctgcgaagaccagaaagacccgagaacaggtaagattaaggtaaaggggtgttacgctgaaaacgatattgttgctcgccagtgcagatgctgcggggtgcagcttaaagaccccaatgacaatctcaccgggaagcactatacgcaaaatgactggtatgatgttgtcgggttcgatatcggcttgactcgcaatcagtcaggtatcatcttcaattacgtgttactgaaccatgacggcgagcgattcaccgcaagggaaaagttcttcccggaatcagagaatcagatttgcggcaagttgtggcggcaaaaggcagtcttcctgcacgttagcgacgcggtaatgcgcggcaagttgggcgggatgaaaaatgcgcgaaaaatccttgagaatgcgcattacttccgagcgccgaagcgcgtaacgcatcgcgttaacggcaagaaggaagatattatttcacgcaaagattttggagacgaatagtgattactgataaaggtgattatctcgaatactacggcgggcctgtgaaggcctgtccgcttgagaaaatcgatcagatgaatagcgtttcgtggctgcgtcacgaataccctgattatctgttctggcatacggttaacgaagggagtaagcacaaggcgagcgcggttatcgatcatcaaatggggttgctgaagggcgttagcgacattctgatcctgattgggttcggcggcaaatacccgttcgcggccatcgagctaaagcgccagggcaaggcgcaggcgtcaccagtgagcaaggagcaaagggagttccttgctgccgtccggcgtcgcggcggattcgccgccgtggcctatggcttcgagcaattcaagatcgctttctgcgatgccatcaaatagcactttttgttaaaacagcccggcgaaagccgggtattattatcccatcgaaacgaagaacggagaaacatcatgaaaaacttcttgtgggtgatcgcatcaatcggttttggtattgtggccactggcttcggcctttgggtaattactcttgctggtcattttaagggtttctaaatgaaagatatcgcagacaaagacactcgtgacgcattcatcacgtttgagcaattggagcgcgaaacgtttattggcaatgcccttgctactggcggacactatcaggctgtcaggccagacaagttttaccaggtaacaggcaaccgatacgccggaagcaaaacgcctgatatcgtgcgcgataagtgggcgaccgatcgcagtctgatcgcgtacatggaagagcgctatggcccttatgatcttgacgcagccgcagaccgaagcaacgcagtttgcccgaagttctacgacgaaaaaacggattgccttaaacgctggtgggggaaaaacaagcacgtttggctgaatcctccttactcgtttccagatccgtttattatcaaggccattgagcaaatggagcacgacaaccagatcgacattctgctacccggcgacaattctactgcctggttccgtgacgcgcagaagatggccgccgagattatctggattgttgccgatgttgaagaggatgatgacgggaacaagttaagtcgatccggtcgcctcgccttcattaatggattaagcgggaagccagtcgacaacaacaataagggaagtgttattttcatcatgcgcaatctcaagccgggagaggagcaaaagacgctttacattccggtaagcgagatttgcccgtcattagctaaaaagcgtatgcgcaaacgtgggatctgaaaaatggaacagatagagtctttcgccgagtatcttcggatcgttgttgaacttctggacaagcacggcttcattgggacggatgaggaaaagttggcctttgctgacaccatcgacggaacctacatggagttcatggacaacggaaccccggtcgctgactggccagaaattcttgaacgagaattgattgagtttaaatcacatgaaggcgcggagtatttcgcaaaacagcactaattgctaaacaatacccgccgcgtgcgggtattattactccaccaaccaatcaggagcaaacgccatgaaaaccaaaaccattgcagacaccatcaagatggtaccagcaaaagcgcaagttgtatcgcgccacctggttaacctttctcgcctgtgcatggccgactacatggcgaacccttcagaaaatggccttgatggcgttgtgggtgaaatctatttccgcgccgggtacggccttgaaagcgtggccatgtatgagcaaatggccgagggtttttgcatttacggtgacgaatgatgattgtagagactggtcgcgctgccgtatggcagcacgccaaagaagcaggaataagtgatgatatcgtgaagatcgcaaagtatttcgatataaaggatatctccatcgtgttcggcgggaagtttacttacctccacgagcgcccggtgaagcgcacacgaatagcagtggcaacacgtgcggaggccgacgcgctgaagatgttcatacacgagtcaaagcagaccaaaaaatattacaagtagcggggacgtgaagaatgcgatatattgcgatcttatttacggcgatcatgtttacgatcgcaatcattaactatgcaattcaattgggataaattatgtcacctaaaatcacagacgaagaatttttagccgcccgcgaggaaggtaagacctaccgcgagatcgcggaagagttcggcatgaacattcgaagcgttgaacgtcgaggcgttcgcctggcacgacaaggacacctacacggaaacgcccacgttgcgaagcatatccctgacggcttcggcgtcaaaggcacgtcgactatgattcgcgcggacggctccgaggtcgttcggtgggttaagtctgaagtagaccgcgatcgcatggttgcgcttatggaggcggcgcaggcggctttctgcgaagaccttccgcgagccgaaccgcaaccgctggatgaatcgaagttctacattgaagatcagcttgccctgtacccaatcttcgacctgcatattggggctatggcgcataagcatgaatgcggagagaactatgataccagcacggcagagaaggttctaaaccgcttctttgattattccgtgtcggtggctccgcaatcccaaaaggctgttttgctggttggcggtgacttccttcacagcgacggcctggacgcagtaaccccggcaagtggtcacgttctcgatcaggacagccgatacgcaaaacttgtttatgttgccattcgatccctgcgtcgcgccgtgtcgctactgcttaacaatcatgccgaagttgaagtgcaggtaatcgaaggcaaccacgaccaggccgggatgatttggctacgcgcagcgctggcggcgttctatgagaatgaaccgcgcgttttcgttgatgttagtccggcgatcctgcatcgcaccttgtggggcaaaaccatgctgggctacacgcatggccacacgatgaagaagcctgaaacgcgccttgctgcgatggctaccgacttccgcaaggagttcggccagtgcgactacatttacacgcattccggccactggcatcaccagactgtaacggaacactcgttaggaattgatgaagtgcatagccagttaggcgcaaaagatgcctacgcagcacgcggaggatggcgttcataccgccaggctgcggtgattctgtacagcaaagaatatggcgaagtaggccgctttatctaccgtccgaacatgtaaccacaacggccccgcgagtggccaacaaggaaaaccgatgaatagaaatatctgcattttcgatctcgatggcacgctttccgacggaacccaccgcttgcacctgctgccgaaaaaagatctccaccttacagaaagttggagcgaatttaatggcgcgtcaattggagacagcccaatccaaagcactattgacgtggcgaatgcgctttatcgatccggaatgaccgttatcatcctgactggccgatccgatgaggtgaagaccgaaacaatgatttggcttgaccgctacggggtgaaatatgacagcctaatcatgcgccgcgccagcgataaccgtaaagacacggtaatcaaggaggaggagttacgcaaaatcggacttgatcgcattgttgcagcgtgggatgattcccccaatgttattgcgcacttgcgcggcctgggtattacgacttaccaggtctgcgactacggagaaaatcttcacgatcatttaaaatcacacggagtagacaaatgaaaaatgtaattatcctcaacggagcgccgggcatcggaaaggacactatcgcggaaatcatctcgcggaagtggcaatacaagaaccttagcttcaaacagccgatgtttgccattgctcgtgctgtgctgggatctactgattttgcacgctttactgccagataccacgaccgcaagcacaaagaagtgaaatgcgattttttgggcgaccgttctcctcgtgaattcatgattcacattagcgaaaatttcgtcaagccgaccctgggcaaaaatcagttcggcaagttgctttgcgattcggcgctaacttcgccgtttaactgcatcgccagcgacggcggttttgatgaggaggtcgagcacgtcgcagcgcatgaggcgcttaacgtatttgtcgtccgcctccatcgtgacggcatgacctttgagggtgatagccgcaagcatattcgacgcccggatcttatttgcgacacgtatcacgagcttgattttgatatgaccactggcgagccggaagacgacgcgcaaaaaatccttgatatggtgtcagatgttgcattaaaattataaagttaatgcctttattatcaccaccttaacgattgggaaccttaatgggttcccttttttttgttcttaatttggcctaatgcatatatcatcaccttaccatttaactaacagaggttgcatatcatgcgggaattcatcaacgcggcaaccaatagcagcggtggcgttgccctcgcgggatctgcaaccgggcaattaatcattgctgccattggcttatttttcatgattctattcggctccttcggcgcgtggttgcgctggcgagattcaaaggcgcttcgtgaagcgctggaagtcggggatatcaaaacggcgatgaagatcaggagtaaataacatggggattaaaacgcgggttacattcgcggcggcggtggcgatcgcggtcgcgttcctccccgaagtggaggacacgaaatacaatgtttatatggatatcgctggcgtcccgacagtatgcgaaggcatcacaggcccggacgttatcatcgggaaaacctatacccggtcagagtgcgacgcgcttttaactaagcatatccaggtggcgaagagaaccgttgacagcaaaataaaagtcgatgttccggacaccttcagggcgtcgatgtacagcttcacgttcaacgctggcggcggcgcatattctggaagcaccatgctgaaattaacgaaccagggcagattgcgcgaggcgtgcgagcagctatatcgctggacgtactaccgcaacccgaaaacgggaaagatggagaagtcgaaaggcttgtataatcgccgggttcaggaatatcaactatgcattaaggatctgaaatgagcacattaaactttcaacgagcgctggccatcggctttatcgtgttggcggctgccgtcgtttccggttgtgcgtcaagcgtcccaatcctttccgatctggttggtagcaagccggatatgacggcgcaagtcggcgcggagaacgtgaaacaggcggttggcgtgacgaacaaaacggacacgtcgagcaagcaggagaccacgttcaaagagtctgcggtaggcaaggttgacacgtcgaacaagaaatccgtaacgacctccagcattcacgccaaccagattacggcggacaagatcgagatccggaatgatgaaagcggaagcctgattccgtggctgattggtggtgttggggtagtaatgctggcgatcgtggtgttcggtctttggcgtgaacgaaaaaacaaaggggcgtaatgcccctttttctatatgtaccgtttgacgtgcaatagcgctactccgtcttcatcgttaaggccatgttcaaccgtgttggttgcggccattccttgatagagcaagatgagcgcggcacgcaagtaattttctggtgtgatctgcttcacgcaaacaagcctgtgaacctccgttatcagatcttccacctggtttcccgaaaagctgttcatcactgagttggtcaaggtgcatcatctcccacatatatcggttatccatcccttcgaacgaccggaaatcaaaacctatctccctgttatcaggccccgtacaccacacagcgccgttttttccgtcaaggtatccattcgtatagcttcgcgctaaaaactccttagagaccattgaggcgaacatacgttgcgacacgttggcggcttttgccaggcgaggcgattcgcggtgcatatagacgaacttcgcaaaatcctgccgggtgaattcccggcgagattcgcagaacttgtaaatgtcaagaatgaacatcaattacctcatgaacgacgggttgataaagacttcggaatccatcacgcagataaagcctaattcctccatcttcggcaataagcgttccttaatctttttgctcaccccggcctgacctttgaagatcttcaggttgcggcatgcgttataaatgccctggacggtcataacaccttttgcctgcttgcaacgactggcgataacgtcatacagcgctttaatttccgctccctcaccagcaaatccagaagagtcagccgacgacaaatacgttttgctcaattcatggaacatgatgatcgcttcgtcaatggtcgccgtgtcgatcttcttcgagcgcttcccgccgggttgccagttccggatcgtgtgaatcacggacgccagacgcataacctgcttatcaaacttacccatcgcaccgcgaagcattgtatgcgaatacttgccgccgtcgcctaactccggttctaactcctggcgggccttattcagtctccgcattgccgcgtcagtaacctgcaacttaacgtttgactcgctcataatatcgtgaatcagccggaagtaatctgccttcaatgactggtctatcggctcatatgttgaattcccgttttcgtcgatgaacacgcgctcacccaaacgggtttgctcacgaaccaaaaggaaacgctccgagacaccgatcccgcgagaacccgcctgcatgatggcgtcgatggtttcatcctgggcaattacgcaaatacagcccaaagccacgaatgacatattattgctaacgtcggcacgagcgatcgatacgtggcctttatcccatgctttgagcaccagttcgctgttcgtcttcttgccgccatcgttgccatacgtgatccccaaaaggctgttaaccgccgtcgcctcatccgagataacggcaaagttgccctggcggttgttaatcttcgccaggccttccggggtggtatcggataccgggaaagttagatcacataatttttcaagtttctcttccagttcgtcacgatcttcgaaaagtttcaccatatcagattgcgataactcccctttgagcgcctgcttgttggcggacagcttcgccatgattttcttacgctccttcttgcgcgactcgttaatgcgctcgacttcggcgacgatcggatcgatggccagcgagttaatggcagacttaccagcggaaggcggctgcgacgtgataacgtaaagcgttgtcggttgctcgctgccgtggtactcgacccaaaagcgacccatcatcgcggcggacacggttccaagaaagtgcatgtaagcggatgattccgggaactgaacagatctggcggcattgagcgccagcttgccgaccacatcgtaatcatttgcgatcgagattgttgggtatttatccgcgtttacgtcgatatctttgggctttggccagaatgaaacggagtcacgatacccattcgcacgaatcgcaacgcgcagggggctgatcccctccctttctgcgatggcgataatatcttgcggtgatacgcggtcatttaaaaacatgcccttgctcctgattggttaatcgttcggctaatcatatgccgtattaaatccgagatccagtgataatctaaacacgcttgaaaaacgcgcttggattatcggggcgcacggccccgaaccagtcacaggtatttagcttcgaaagtcgttccgtccgatacactgaagccaacttcctcgcggtacagcgtccagcggcatccgtcacggtcaaagatgtaaccagcaaccgcgccgagcgcacgaccgctttcgacctggtagcgcttgccgacgctgaatgattttttcatcgggttgctatggtcaaggccgacgcattttagcgttttagttttgagttcgatgaacgtcgcaaccgccgctcctccgtcgccagcaataaacaactcaccgctaacgcctaccgacaaaataacgcgcttcttcttcagttcgacgctgtcatataccatcattgacacattaccttcatcgtcgacgcgggcggaataaaggttgttttcattgatgttaacggcacggcttgacgtgcatttaatcttgattgacttcgccatttattttctttctcccatctcgatatacaggttaaccagatccagaaagtcagctttatttctgcaactcaatttaaagccaacgtgcgactcaattttattttgcatcgcagccagggttgctccgccattattcatcctgagaacttcgcggcatacttcggcgagtttttgagatatcatttcttcaccacctttatttctattttctcgcaagcaattttaagatcattaatcaggcggttaagccttaaatcggtcattacatgatgatggcgaacatcaataatccctgcaacaactaacagcataacagcaaagataaaaccaccaggcccggacatacacaaaatagttaacatcatcaagataataaatttcatttccgtttactccattgcgtttctatggggtaatgctacccgactttcgccgggtagttttagcaattcgtgctattctcgataattcgcctggaacacggcgcgggcaaaacctcgcggagtaatggagcgcagcattttagtcctttctgaccttccgcccaaaaacttccaggcccaaaagaaattcacgccttctactccatccggcggcggaagccgtttcggttcgacaaaaccgtttccgtgccatatgcacgttttcttcgtgtaattgtcacagtgtggcattttgggatgccacacaggttcgttcggagagacatagccaccgaagtcgcgcgggtgaaagtagaaatcaggcttgcgccatagtgtcgacaatttgccaaccgggttttcgaccatccagggacaaccatacttattgcctaattgctcgaccatcttcgcatcccctgctgcggataatacgtcattatcttcccttacgtgcttgattccgctatgcgctaacagcgtgcatgacgggaaagcgaaaatgaagtcaggatcgggaatgccgagaatcgatcgcttcacgtcaaaatccttgtcaatccaaatgttaacatactggatattggggtgaaacattctaatgctatattctccgtggtcgccggagtcggcattgaagcaatacaccttgcatcccttgatggcccacggcaggcccatgatgcctgagccgtcgaacatgcagtaaataaccttgtctttcatgctttccacgcctcaatgaacattctgttcgattccagcgtcagcgtgacgccagccagggaggactgaacgaggcgaccgccaggaaccgtcccgatgatgtagcggcctttcgacttcgtgatcgtgatctgagtgaagccggaggcgcggttcatgcggagaacgacgcggccatgcgcgttcaggacggcgagaatggaatcagtcttcggatggttcattgtgtagctccttcgtttgttggtatggggacagtatgccactatccagcaatgttgttttagcaaaacgtgctattccggaacgcaggtcgcgtaatcctggctaatgtagatcgtgcgctggacgcgatgttctttttcgccgagttcctgaatggtaacatcgttgctaccgacacggcacggaaccgatccgaagataaactcgccagtttgcttgtcgttgatttgccatacattcccaccttcctttttgacaaccaggaagggcgcactgtccgcgctgaactcttccgggccacgaccgtagtaatgcgtgatcgcagctttggcagcagcgctgaaggcgtcggtaacgtcattggtcgccttgtcgcggatggccttgatacgctcttccggcgatccgatgatgtaggaaaagctgttcgaaatggtgactgttcgcattatattttaacctcgttttggttgatgaagtcggcgacgtaatggcattcgatcgggttctcgatacccgccagcacctcacagcgcccgttattcagtagctggcaatgctggcactccgcaccgccaacgctggcaatgacaatggcgatcccgttgcatgaaccgccgaacattcgatgagggaaggggtaagcatcgcaggtgcaaaccacctccccggctcgccgcttcctcatgcgctacccttctcgatgcagaaaacccaatcacgagcgtcaaccgcaaagcgtgcaacgccgtcgagcaccacgaagacagtaaacccgttgacgccgcgccccttctcgatataggttacggtacggaacaggtcgcttgcgccatattgaattttatccccgacgactacatccgcaaatgctttcatggttaatctcctgactggtttcgatgggttaactataccaggcctttcggcccggcgtttagcaattcgtgcttatttcacgactttcttcgctgccttgtacgcctctttgaaggccggaacatcttcgaccggaatccagaagccggagccatagccatcatcatagcaggggcattggtcgcagtagtcgccccaggttttctcttcgccaccgattgagaagccagtggccatttcgcataacgcttcctcaaccgcttcgatcttgtcggcgtctctatccatgataacgaagttccacttgccgttatactcgctgcccaggttgattgattcgcgttgaagtttcatagctttagcccctttggctcaattcgtttcgttgaagtcatcatagcaaagtcgatcgggtggcttttgacaaaaaatgctattcctgcgattgctgattattccaccgattaggaatagtggaatagtgcgtgattgcacctgattccctggtgattagttttgacgaatcatgattgcttttgattgtttcattctgtgcaatgactttgtggagtgtttcagtatttgcaacgaattgcata

SEQ ID NO: 3 - DNA, 50073 bp, Klebsiella phage
  source 1..50073: mol_type = genomic DNA
aatgtatgcaccatgcacgcaatttgccgatcgaagctggcaaaacgtcgagttgtgtttcgccaacatttacgtcgtgtgggagtgtgggggcggaatcatcttacctaaaaattgcgcaaaaaatgaccaatataagcccatatatagatagtaagtatatgataaataataatattattattattactctttatctttatatatgtttggtaagatttctccggggaggttatggattcctcttgcgcaagccataatttttagatgttccgccgcgaaaaaatgtatatagggatatataggggatgacagcaaatcttaccaaacacgccgaaaccctttgacggcaaggcctgcggcctgtattatcaccttccgaaacattaccaaacgccgtaaatgtgggggaaacacaaatgcaatacaaaggctatgagttcgaagaagtcgacgtgtccgagtggatgcggtacgacgcagaaaagcaagccgcttaccatgaatggctgcaatccataacgtttggcgacgccaccaggccagccggacggagccaggaagcagcgaagccggaaggcacattcactggtaatcgttcgtccgagatccggcgcatgttcctggatggcgggcggcgtatccagatgacggcggaggagttcgtggagaagttcggcgttaatccggtcgacaaccatttccgcaggccgttgctgaaactcctggagccgggcgaggtgttgcgggtgagcctgggggcggggttaatctccgtctttaccgagttcgacgcaatgactggctcacacctggaagccgaggcatacaggcggcagggcgctatctctgagcgggaaagaatacttgccatcattgacgaagtgatgccaggaggcatcatgctaaaaggctataagctggcactaatcgcaaaaatcacaggagcacgataatgaaactatatccagaccaaaacgacccggcggcaccgatgcacctgggcgacacgccaatcgacgagcaggaggttatcgcagccattgccagggcatcggacgacgaaaatccaaccgccatggaatgcgtgacagccgacctgctgttaatgtcatttcttccgggatctgaatcttacattcagcacatcaccgagacgggccaggcagtgacgaagccggaattcatcggagcgtctaacgtcctggcgatgatggccgatgaggccgacaacatcattagcctggattatccacaatgagcgcctttatcctgttttccatcggtgttaattgcggattgctcctggcggcatttatcatccacctgagcaacaagtagcactttttgttaaaacccggtcagagcgatcgggtattatctcttcatcgacaacgaaccgaggaaagcgaaatgattactctgatcacctgggaacacgaaaacagcaagccagaagtgcgcgagttcgagaccgtggcggcgtgctacaacttggcggcaaacggtggcttttacaaggcgcagatcgttaacgagttcggggttgttgattatgaattttaaggcgagcgacgtaaaacctggtgtagtctacggatcgcgcctcaataaccgcctttggcgctgggacggcgaaactatgtggactaaaggcgagggcgatgttatatggcatgaatgcggctggcctcatcccacaatgagccgcctggatatcgcttattatctttcggtcggcgatatgcacgaggtcgaagatagcactttttgttaaaacgccgcccgcgagatccggtattatttattcatcgacaacaaagaggagatgaaaatgagcaagaagaatccatattcaaccagcaactaccataacgaacacgtcatgcgctggcactggcagaaactcaaagagcgctaccttgcacgccagggcaaataatcacaatagcgccgcttcggtggcgctgcatccccaccaccagcacggcaaacgccatgaggaatggccatgccacgattttcagcaacaaccaaacttcgcaccttcgccgggatgccgatcccacactcatcaaccaaagccgtccagggcagcgagcacggcgtatacttccactggcagggcaagtggcgtttcaccgtcattcgcggcttttacgtgacctgcgatcgcgtggatatcgagaaccattccggcgggaacaaggttcacgagttcaaaaagcacgaatagcactttttgctaaaactcgatcgggtcaatgcggtattattaccccatcaaaacagaggagcaaaaacatgattggcaaccacaacaacgaactgaacgcagcagaccaccgtcgcgccgtcgagcagaacttcaactcgcttaaagtagcctgcaatgagatgaaagcactgcttgaactgccgtcatgggatccacaactcgaagactactatgacggcctccgcgccaaacgtgacggtatcatcaaccgcctgcgcctggccgggatgttcctgtaaggagaacgcaatgattcacgaaattaagtctggcaagcaagtagtggcgaccataacgcagcgccacgttgtagccttccagattaacatccctggcaccttcgatatgcagtcgcttgacgtgccagtttgggccaacacagttgccattgatgccgacggctcgatttgggcctacgagtcgaccgccgaagatgtttgcatcccggactactcgcgcaaatcctgggttgattgcgggccttccgaaaacaagatgaggtcaattggggagatggattgcttccctgattgggagaaatcgaagattgacattcgcggtctgaaatagcacgcattgctaaacgcccagtcagaggaacgggcataatagccacataccaaacaacggagatttaccatgaagcagatcgtcaaaaacgcagttgtcgccatagtcggaaccaacttcgaaggcaagaaaagccgcattcaccttttgcacgttggcaatgatggcaaaattcgcggagctttccattacggcgagcgcggggagcaccttcacagtgacttgcattccgttatccagctaaccactttcaacgaatggcgaacccatcgggaatggctgccggaataccattacgagggtttgattgtcgaatagttcgttgccgacccaacgaaacttaccgcccgcgactataagcgcatggcacgcaaggcgcacaaactaatgaaacgcacgccagaagatcacgtctggcatgttttcgcaaatcagctttgaggtggctggatgatacgtttatcagacttcgatcgccactgcttaacagggcaattcggcgaaaagccagtaatgtgcaagatctcgaaggttaagggcgagccgtttgagcaaatcagaacgcttataagttttgccagacgaaaccgcctttacatccaggcacgcggcggactgttcgcaaagcaggttcattttgcgtatggaacagggttctacactggcggagacggtgttgacctatcgcctaaaagggttaggctgcgtgagataatcgaacgcggctacgtttggactaacgggatctactaatggaaacggtaaaagtaatttgcacgcacgctggctattcgccgctatcaacctatttcacacctggccgcgagtatgacgccaggttcggccctggccttgatgaagtgtggattttgcaggacgaccagggaaccactgaggacgaagaattttggcccgcctgccgtatgccggacgaaaagatcgccatgtacgccaataggccatacgaaaacaacgttttgtttgaggtgaaagtatgaaagtaagcaaaaagaaactcgcgctgtattgggccttcttcctggctggcctggccctgcatgacagcgtgggctggcagactatcggaatgctgtgcatgattattggcgtatgccgcctgtcggagattaacggattccgccggggatatcgggcagcattcagcggcgaaaaagaatagcactttttgttaaaactgccgtaacgtcatttgataaagtggcgttactgaagtgaacaatccaatcaggagcaacgcaatgaacgataatttaatcgcactgctggaagaactgaattcctacggctgcgcatacatcgagctttcgagcgagcaggttattgaagtcgcaatcgacgatgacgccgggtttaccagattaagggtggcggcaggggccgaagaggaattcgaagactgcggcatccgtgaagtaacaaaccttctcgaataccaccaggtgaaggagatccgctaatgaacaccgtcaaacttatggttgtcaatgcggcccgcgagcgtgagcgccaccttatcggctgcgtattcgatgccgtcgaggtgcacgaaccgctaggcacagtgcacgtaatccagggcggatacctgaacgaattcatcgtcaacccgctggacaccgacgaagatttgaccatccgtgttggtagcgagccggaaaacgcgcttttccacctgcggaaagtatcgaaggcgtcgcagcgcaagttgctggttcgcgcactgaagcgcattgcgaaggagcgcggttacaccgacgcatacatccgcaagttcggcacgttcgctggcgtaggcgattgggcgcggtcatgggccgacttttatttcaacaaatccggcgaattctgttccgtgcatacggactggctgcatggcacagaacacgatcccgtaaacggccacgagtggtacgaattcattgaggcggaattagacgccctttgatagcacgaattgctaaaacgaaagtccggggatggtgcatactatccccacactaacgaacaaaggaaattacccatgaacagcatgaaaattaacctgatcccgtccgacaacttcaccaaagacgacgacccgctgttagccgccgttattcgcgccgggatcggctgggcgcttagtgatgcctcgtgcgaatcatttatgcgtgaaccgttctcacgaatcgcggagcttgaaaagcaggttgctttcctgactggtgaacttcaggcggctatcgccacgatcgagaaggttcgggaaatcatgcgcaccgaacctggctatgacgttgaagatcacgcgcgagttttgcgcatgatggccgacgctttcgcaaagctccagcaatagcacgaaccacaaacacgaatcgtggttgctacatgtcaaccccatcaaagataaggaaaaacatcatgatttacgcaattattgccctggtggttcttattatggccctgtatgcgtgcggctgcttcctcatgcgggccttcctgaaatctgcggattctaccgacaaagaagatctttatcctgtgctttgctggccctggattacactttccgccgttggcagcgtgatcatttcccgcaattttaagtggtgaggcgatacatgaacatcaaaatgtggttcaacggatttacctacaacgtgcgctttcgcgggaagttctattactggtgtgatgagggcggcaagcgctggcggattcgcccacaccagaaaggcgcgagttatgagttaggcattgccgaggcgcaggggcgcgtcgagtgggttaagctgaaagtcatggatggcctgccaaatagcacgaattgctaaaaccgatcaggggtaagctggtatagttaccccatcgaaacgaaacggagttacagcaatgaaaatcaaaataaccaaaatcaacactcttaatggcgacggctcaattaccctggaagaatgcggcctcaaaatcggcgaagttcttgaggtcgacggccacttcaacgacggctcctactgtgtgattgctccgcgcaatagcgagtttatccaggctggtgacaatatcagcgtgagcgaagatgaatgcgaggttgtggaagaatgagcaacaaaatttgggttctaacctacaccattggaaccaacgaggggcgcaaatcgcgccgcctcatctgcgacaccaaagagcgggcgattaggcagcaaaccgttcttggtggcgaggttgtcgagtatctccgcaagcctgaagcgttcaaggtgaactggccggaaggcatggatatcaacggcgctttagcgagcctgcgtgagatgcagcacaacccgaagacgtggagcgaccttcaatgcctgcgggcagagccggaagtgaaggccgacccgttcaccaatattcgggcgcagcacgcggaatggtcggatcgccagttcggtaacgttgggccagttgggccgctcaagcacctggcgaaagaggcgatcgaggccgccgaagcgccggatgacattagcgagttcgccgatatcatcatgttggtatgggacgcaacgcgccgcgccggattcagtgatgagcagttggctgaagcggtggcggaaaagctggaacggaacaagcgtcgggcgtggggcgaggtcaaagatggcgagccttgccaccacgtgaaaaattaacgaaatcgaataccgtttaaagcgcctgtaagccattctggcgggcgcaaatttaaggagtgcgattgtatgcctgaatactcaaaagtcgaagatatgccgattggcgcaacgattacgggtatccgtatgagtgagtcggtcgacacaatcgagccgctggcgttcccggttacgcaggtggagacggacagcagaaaagggttcatcttcatctacaaaaatttcaatagtccgctgcgtgttgaagtgttcattgctcgcggaacctgggtagaatgggagaaggacaaatgttcggactgaatgaagcgcagtacaacgctgtgaagcgcatagcaaagcagatggccgcagaaacaaaagacgccatcaagaaggacaagaagacctacgatcaggtcgccgcgaagatgatcgataaacattgggcgcaaatcaacacgctggttactcgcggccagtttatctggatagctggctacctggaaggccgattcggtcgcagggatggcgagtatgaataaaaaacaggcaaacgaatcagcgacctattgacgtcctcgcgctgaccgggtaacttgaaccacgtagacacaagaggcggtaaacatccgcaagtctggccccgctttggggcatttacaaaaggggttgtgatgcagtacaagatcatgctcacagcaagaaaaatgggcggcttttgcaagtcctgcattcaagagtttagcatgacgattgaggcgaacgacaccgccgacgcggtggagaaagcaaaaaagcaatccggcgttaatctggatacgcataaaatcaacataaactacataagggaagtcaatcaatgttaactctgattattgcactgttaatgctgttcataggctatcatgttggcgcggctcatcttgtcgagcgcctttctaagcgggtacatgaaggcacgtttgctgccatgatgtacaataagaaaactgcacgttgggaaaaaattggcgatccggatggtatcgcaaagcgcataacgttttcgccgcttccgtatgttgactgcgagcctttcgtgaaactacagaagacgcttaatcggcgaaacaaactgatatgatacaacgacccgcttcggcgggtttttttatgcctgcaatctggtatactcgcaactcaacaaagaaggagggctaaaaatgtctgaagaacgtagaaagcgcgtaacgaaatcgcactttgagggaaacttcaaagcgctatatgaaaaggaatttggcgtcgtgctggggcgcacggcagaaatgacgccagaacaattttttgatatcgcaaagcgttacttccagtgggccgaagagaacgcaatcaaggcggcggaaacggcaacattccagggcgacgttaacgagtggggagtgaacaagcctcgcattttcacgatcacagggttaagcctgttttgcggcgtgaaccagtcaacgcttgggcgctatcgccacgacccgaactatgcgccagttatggagtttatcgactccgtaatctatgagcaaaaattccagcttgctgccgtcggcatgattaacgcttctttcgtcggtaaagagatggggatcgataagccgccagtgctgaacatcgacgctatcgccggggataagaacgagatcaccgaagagaaattagagaaagccgtgaccaatattcttgataagctgtaagggtaggctatgaacgaaatgatcatttgggaagacctgtcgccagccgataagctggcaattaaggcactgagtacgcgaaacttttcgctattcctgaaaatctggttccagatcattcagggcgaaaagctaatgtggaactggcatcactcctacttttgccacacggttgatgaaattatcgccgggaagcgcaagagcacgatcgttaacgttgcgccaggctccacaaagacggaggtgttttcaatccacctcgcgccgtatgcgtatctcaagtgccggaaggttcgaaaccttcagatctcgcagggtgacgccctgtcaaaaggcaactcggatcgcgtgattaagatcttctcatcaagcgagtggcaggagctatggccatcaaagttcgggcgcaagcagatcgatgaatttcaggtcatggacgataacgaccgcgtaaggcttgaaatggtctcccgttcgtccggcggccaaatcgtcggtaagcgtggcgggtacatgacgccgggattcagcggccttatcgcgctggatgatatcgacaaacccgatgacatgttctcgaaggtgaagcgtgagaaaaaccacgtactactgaaaaacaccattcgatcccgtcgagcgaagaagaagaagggcgacgaaacgccaatcctttccgtgcagcagcgattgcacgcgcaggatgccacctggttcatgatgagcggagggatggccatcgacttcgatcgcattgttattccggcgatggttacgcgggaatatggcgaatcgcttcctgactggttgcgtcctgagttcgaacgcgacgtgctttccggcccgtcggtggttattgacggcgtagaatactggtcattttgggaggacaacgaatcgatcgagaaccttgttgccttgcgcgaggccgatctttatacgttcctttcgcagtatcagcaggagccaatcgccctgggtggcaacgtgttcaagtcggagtggtggcgctattacggcgattccgacaaggcgcacgagccacgcccggacaagttcgaatatacgttcatcacggcggacaccgcgcagaaggtcaaggagctaaacgactactctgtaatgtgctattggggcaagtatcgggatcgcgtctacttcattgacggaattcgcggcaagtgggaagcgccagatctccgcgttcaggccgaagcattcatcaagcagtgctggcgtcggaacaaggagtgtgggaaccttcgccggatctacatcgaagacaaggcgagcggtacaggtctaatccaggatttaacaaaggcggtaaacggcatgggcgagatcgtcccggtgcagcgcgataaagataaggtcactcgcgctatggatgcacaaccaatcatcaagggggggcgtgtcgtgctgccggacaatcacccattcgttgcagagcttgaggcggagatgagcgcgtttacatatgacgattctcatccacacgatgatatttgcgacaacgtgtttgacgccgcaaacctggaaatgaacctgagcgacgatccggtagagcgaatgaaacgccttgcgggattgaaaaagctgggtcgctaatacataatgtgggcctgacggcccacacttaaacaaggttgaaatatgaataacattaagatggacgactataatcaaatctttaatggtggcgctggttatgcgtcaaccctcgcgtctatcgcggcaagatttggaacaatgtcgcaggttgaagagttctatcatgaaaacggcatggcgaagaaaatcgttgacgtgatcccggaagagatggtggctcccggcttccagctaaacggcatttcagataacaccaagtttcaatcagaatgggacgggttaaatctggagccgcaaatcaccgatgccctttgctgggcgcggctgtatggtggctcctacgtcctggcgatggttaacgatggtcgcgcattgacttcagcagcgaagcggggtaagccgctcgaatcgatcgttgtttacgaccacgattccgtttccgtcgcagaggaggaaaccagcccgcgaagcccacgattcggaaagcctaaaatgtacgaggtgaagccgctaaacggcgggcaaccgttcaaggtgcactatacccgtatgcactacatcgacggcgagcgagtaaccaacaaggtgcgcaagctaaataatggcgctggcggttcggtgctgaacaagtcaatcattgaagctattcttgactacgactattcggaatatctggcaacgcagctactgaagcgcaagcagcagggcgtttggaaggcgaaaggcctggcgctaatctgcgacgacaaagaaggcgagtacgccgcccgtttgcgcatggcgcaggttgacgctaattcaggcgtcggcaacacgatcggcattgatgctgacgacgaagaatacaccgtgattaactctgatatttcaggcatcccggaattcttgtccgctaaaatggatcggattgtcgccctgtcaggcattcacgagatcgtgctaaaaaacaaaaacactggtggcgtaagcgcaagccagaacacggcgctacagacgttctacaaactggttgaccgcaagcgcaatgacgattacaagccgctgttagaattcctgttacagttcatcgtaacggaggaggaatacagcgtcgagttcgaaccgttgtcgctgcctaccgatgcggagaaagcggatatcttccagaagaacgccaacgcggctcgcggcctcgttaccgaccaggttattgacgccaacgaagcgcgtgatactctgtcggcgttaattcctgaactgaagctaaaaggcaacgctccgaagcagaaaaaacttccggatcgcgccgctggttcaggcagcacgcaaagcgcagagatcttaaacaacacggaggcggatgatgaaagttaacggcagaatcccaaactggcgttatcctgaagcaagcgagcgggatttatcccgctccatgcaggacgcggtgacagaactcgtggtagaaatgcgggatcgcttagaccgcctgaaatttgacgccacggcggaggagatcagccaggcagaagacgatatcagcgaatcggccatcgtgttcttttccgccgtaattgcggcgctttcctccattgggttgactatctatagattcaattctaaacagtggcttgcaattgcgattgcggctggcgggcggaacaacgaatcagttatgcgccttaaagaattcggcgctggcgggtatgaagactggtatcaagattcgttgaggaagtgggaagataccgccgaagcgtcgatcaggaagttagcaagcgatatcgttgctgactggacgacgaaagttagaaccgccaacaacattggcaagtctcgccagcagatcgatgaaatcatcgaagggcgctacgcgatttatggtagctggtcgcgcaaccgggcaagcggaatcatcggaacttttaacagtatgttgatgatgcagcgcctaaaagatgctaaagtgtcgcattacttttggttcggcatgatggatgaccgcgagcgcgaaagccatatcaagctagaaggtaagcgacgccctgttaatggtgatggcattttccccggcgaggagtacggttgccgttgctgggcggttccgtcatttgataatgaggatgattgatggttaactttaatgattactttaatcacgtaggaaaggatctgatatggaagcgagcaacatcaaaccgagtaaaagttggtgatgttgccgggtggaaagatgagcatgggtatgtatacattagattcatgggcaaactgcgacaagctcaccggatcatttgggaaatgcaccacggcacaatacccgaaggaatggaaatcgatcatattaaccatgtaacggacgataacaggatcgagaatttaaggcttgtaaccagaaaggaaaactgtaaaaacgtatcaatgagcgtaacaaacaagagtggagttgtcggcgtgagttggtgcaagagaacaggtaaatggtttgcatccataagggttgataaaaaagagcgattcttaggtagatacgaagacaaaaacgaagccatttcagcaagagaggcggcagaggtaaaatacaatttccataaaaatcacggagataaaaaatgaaaagagttcaaaggttcgacacggtaaagatgaaggcccgatttgatgagaatggctttctggttgacactccgattgtggcgcgtatcggtgcgcaaacgtaccagacgccaaccgggccgcgagtcgagttccgcccgcgttctgaggtgtttgatgctgaatcgctggcttcataccagggaaagccgatcactttgggtcacaagatggttaacgcgcagaatgcgaaaggcctggttgttggctcgtgttccggcgctggcaaagaagaagggatcggggttctcgttccggtaatgatttacgacggcgaggcaatcgagcaagcgaagaagcgcgttgccgctgaattgtcggttggttacacttcggcagatatcgatcgtaagggttggggaaacaacgccactggcgaatatcacttcgatgatgaactaccggaaaacttcgaagagatgaaaaatgattccgtctctgattgggttcgctttgatgcggtgcaaacgaagattcgcgtgaatcacgtcgcgcttgttttccgtgggcgagcagggattgcgaaattaaatcttgatagcgaacaagaattcccctatgatgacgactcaaaccacaaaggagctaaaacaatgatcattaaaattgacggcgtagatgttgaagtggccgataacgtaggcgcttacattgccaaactagacgcgcaagttgcatcggcaaccagtcaggtaacgagcatcaccgcagagcgcgacgcacttcaaaccaaagttgatggcattgaagatgaagttgccgcccgcgttgctaaaatcaaagccgacgaagacgcaaaacagaaagttatcgcagttgtttctgccgctggcgtcaagtgtgacggcctggatgttaaggcaatgaaagttgcttacatcaaagaggtagacggtcgtgatctgtctgacaaagaagattcgtacatcgacgcttcttttgactttatcgccaactctgataagatggctggcaatcgctccaaagtcttcggcaaaaaagaagatggcgagcaaaaagacaaaggcggcttaccgaaacttgacggcaccgaaatcatcgatccgcaggcaaaattccgccgctaataatttgcggccttcgggccgctaccagaccaaataaacaggagattcaaaatggcacagattccagcttcttattcccgcaagcgtgatattgctgtagcggggcagatcgctgatacgtcactttacaatatcgacggaacttgtgttgctgaaggcgatatcaaagctggcgtactggtggcttccactggcgcagtttccaatggccacaaggtagttaaaccagcaaccgcagcgagcgacgtcattgtaggcatctcgcagttctcgcaagcctactcgcctgaaggcaagtatgacgatgagagcgcagttaacgttatgactcatggccgcatttgggcgatcgctgacgcaactgttactgaagaagattgcgcgttcggttctttcgtcacctttaccgcaaacggcacagtagcgaagggtgatgccggggttatcaaaactggctacaaacacactggcgaatacaccaaaaacgcagatggcactgttctggtgaaagtgcaggtgctttagggcgctgtagctccagcggctacaactggcgacgctggcgtataaaataaggggcttcggccccatttttgcaccagaaaaaaacctttgacggcttaacgattcgtgatattcttcatctcgttaagctaaatacacaaacaggagttttcagatgactatgaaattagatgcattcgaacagagtgccattaaggtcgcaatgcagggcatgggcattgatgccgcaaaactggatgcttacggtatctggactgttaagcagatgactcaattactgaatcgccagtatgagcaggcatacccgcagaccagcgcacttgagcttttcccggtaactaccgagatctcgccgaccgcccgccgctttgagtggctcgaattcgatggcgtaacttctgcgaaaattatcgccgattacaccgacgacctgccgaccgttgaagcgatggcgaaagagaagtcagggaaagttttccgcctgggtaacgcgtggtttatttccatcgacgaaattaaaactggcgcggcgctgggttccagcctgagcgatcgcaaggcaactctggcccgcgaaggtcatgagacgctcgttaatgatctggtgttcaaaggatccgctcctcacggcatcgttagcgttttcgaccatccgaacattaaccgcatgaccgccagcgcggcttggggcgatgacgcagcagcggctgaaaaggcattcgaagatctggaagacctgctaaacatgatcgaagaaactacgctgggccgccatcacgcgaccaacatcgtgattcctccgtctaagcgtcgtcttctgacgaaaaagatgcctgacactagcggcgactcttatctgacctggttcaccaagaaccacccgaacatcaccattacggcgatggcggagctggaagatattgacggcgcaggcaccaaaggcgtgctggcatacgaaaaagacccaatgaacatgagcatcgagatccctgagcggttcaacatgctgccgatgcagccgaaagacctgcatttcaaagttccgtgcacctccaaatgcactggtctcatcgtgtaccgcccgctgactattgcgattctcaccgggatttaatcaaaagcgccttcgggcgcttttttattgcattgcattctgcaatgtgctttaatttgaaacctaaagtaaaccaatggagcattaacaatggccagtaaaaaagaaaccgtagaaaccgtagaaaccgtcgaaaccgtagaaaccaccagtgccgaacaggcgtcgcaggttgttcaactacaaaacgttggtgcatgtgcaattcgctataaaggcaaaaattacgtctatgagcaggtttttgaagtgccggaaaacgaaatcgaccgattccgccacgaaatcttcaaaggccgggtcgaattctacgacaatccgaaacgcacgcgcgaatacatcgcagcggtgaaggcgaaagcgaaagagatcgtgcagcctaaaagcgcggaataacaaaaactaacaaagggcgcttcggcgtcctttttcatatcaggagagcgaccatgaattacacaattcaagatgtgatcgataaaatgcgcagccttgcacctccgcttaaagaagttccagatgaactgctgtctgcgtgggttgtgcttgccgaagagttcgtttgcaaatccaggttcggggattccatcgttacggcgatcgcattgatgaccatgcacctaatgtttttggatggagcgatgaagcaggaaggcgaaagcctggaatcttacacgcagcgagtggcatcgttcaccctgaccggggagttttcccaaaccttcgatcgcgtatcggcgtcaagcgacaacgaaatgctttctacgccgtggggcaaaatgtactggcgtatgctcaaaatgcgaggcggtggcttcggcctccttaccgccgggaacgtgcgccgctgcggaattggtaggtgatcgctatgaactacaaacaaatccaggcacgcgcaagcgcgggcattaagtttttcagtgacgctgacggcgtattcaacaagtacacgaaaggcgctggcggcggaatcgatccggaaaccggggaagatatcattcctggcgaggtggtaacgacaatcaagggcgcgatcagggatgtaaattaccgtgacattaacggcgaaaccatcctcgctggcgataagcgcgggtttttcactcatgatgtgccaatcatggagggtgacgaaatcgaagtagacggcgagcgctaccgcgtggttaatgcccgtccggtaaaaccaacgggaaccgttgttgcttaccgtccagttttgcgcagggtggcgacttatggctaattacacgatccgggagttcacaggggcaattgatgcatggtgtaaggccgctggtgatgcgctggaggacgttgtaaggtttacgtgtgaagatattcaccgcgacctcgtaatgcgttctccggtggatacagggcgcttccgtggtaactggcaaatcacctttaaccgcgccccgctttacgcgattaacgcatatgaccaaactggcgaaaagacaatccagaacggcaaagccaacattgcactatacgcaaaaggggctgggatcacttcgatctggttcagtaacatgctaatctatgcgaacgcgctggaatacggccattcaaagcaggctcccaatggtgttatgggagttgttgcgatccggttgggcgtttatgttactgaggcaatcaagcgagcgagggcgaaaaatgcattatgagatggcgttaaaatgcaaggcggcagtggctaaatttgccgccgagaacgggttaatggtcgcaggagataacgttgactttaagccaccaaaacacggtgaaacttatctcaagttctcctacgtagaagcggattccagatctgtcagcctttccagaacttgccgcgtttatctggctatggtgcagattgacgttgttttcaaacccgggatcggaaccgacgccgcgcggctaatcgcgcaaaacgttgcaaaatccttccccgaaggcaaggttgttgattctgaaagtaagttatatgtgagcgagtgggcggaagtgtaccgcgttcagaaacacgaaacaggctggctcctacccgttcgcttcacagtaagatgcgaaagcgcggaggagagcggttatccatcaacatgactggtcttagaggtgcttataatttcttgccagcctgtaaatatataggcataatggcgttgttaaactttcatcaaaacaggagtattcaacatgcatttaccaaacggtgcaaaggtcttctttgagaaggctcgcggtgcggccattccgtttaccgcaatgaccaacgacgcgaaaaacccaaaaatcacagtggcggacggcaagctgaaggtgaaagatattgtgatcttcaccgattgcacctggggcgacttcgttaacaaggtggctcgcgtaaaagcagtgacagcaggtgtggcaacgctggaagagttcgatacctccgacactaacaagtatccgggcggcgcggccactggtaacgtgagcgtgatcactgattgggtcgaattgccttgcattcaggatttaggcaaagacggcaacgaacagcagttctataactatcagtgccttggcgatgagcgcgagcaatcagaacctacttacaagtcggcggtgacgcttaactacacgtttgcgcacgattacagtaacgcgatctaccctgtgttgcgttcagccgacgccagcaagcaggcgagagcgatgtacatgtatatcccgcgagcttccgaggttcgttactggtctggaattgcatctttcgatgacattccttccacggctgttaacgagatggaaacggtaacgcttaacattgcgcttaaaggtgctcacgtcttccttccggttgtcgtgtaattaaatggcggggcttgtgcctcgcctttttttgtgcataatagcgaataacacaaaccaatcaggagttaacaaaatggctaaattcaaaattcaaattggcggcaacctcccttctttcaaactgcccgtaaccttcacttgcccggatggcaaagaagcgaccatcaccatgaccgtaaaacatcgctccaccgatgagatgaaagacttttatgagagcgaagataaagcgccaaagggtaacgccgagtttatccgctttatggccgaaggctgggatcttgatgatgagttcaacgacgaaaacatttcctggctttgcgctcacttcccggcgttcgtcatggcactgccacaaacttacatggccgcgcttgcgggccaccgtgcaaaagtttaaggcgggctgtttatctcacgcttcagcctgagctaaccgatcgccagcttgccgagtacgggttaaggcgatcggattatgaggcagatcttgaaacgatctactttgatgaacagaccgcccaaagctggcagctattccaggccatgcaaacgcagtggcgcattgggatgaacggcccaacggggcttgactataatacattgcctatgttcttcgaattgtataaaatcgacaatcgagaagcggcattacttgacttgcaaatccttgagggtgaatatctgaaggagatttacaagaaatcaaaataagcgcctacgggcgcttttttcatatgggggctaaacatggctgataaagtagctgggttgacgtttggcgttgacgtttcgcaggttgataaagcggtacgatcactagcagaactgaaaaaccaaagccagcaaacaggcgctggcctacagtcacttgcggacgctgaaaggcgggccacggcgcagaccgaggaaatgaaccgcgcgttgcagcgccagaagcaagagactgacaaatcaaaaaccagctttagcaggatcgcaagcgccatcgatccaacgatcgcaaaaatggccaacttgcgcaaagcgacggaagaacttgataaagcgtgggcgctgggtcttgttccggacaaggaatttttccgccttggcgctatcatcgagtctaccaccaaccaactccggcggcagcaggcggcgctaaccgaagaaggtcgcgcagcaatcgcagaggcggaggcaaagcagaaggcggcaaacgccgggcgtgattttgtcgccagtctgaaacagcaggctgactccatcgggaaaacacgcgccgaactgctggaaatgaaggcggcgcaattgggtgtatctgcggaagcggccccgttcattaatgccctgaagcagcaagagcaggcgttaaagaaacagcagaatgcgatgggcctggctggcatttctgccgggcaatataaaatggccatgcgccagttaccgatgcagatcacggatattgtaacttcccttgcgtcaggtatgccaatctggctggttgcggtgcagcagggcgggcaaatcaaggacagcttcggcggcttgagcaatacgtttaaggtattgttgagctacattaacccgctaacggttggtgctgcgtcgttgggtatcgccctggcggcaatcgctaaagctggttatgactcctggaaagcgcaacgagaactggcgaatgcgctggtgctgactggtggctatgctgcgaccaccaccgggcagatcacagccttaaccgaagagattaacaaaaactcatcggctacgattggcagcattcaggaaatcgcaacatcgctcgccagttctggtaagtacacaatcaaccagattaagcagatcacgaagactacggcggaatggtcggcgcagacgggtgagagcgagaagacgatcacagggtattttgattcgatcgcaaaagaccctgttaaggggcttgccgatctcaatgagcagtttaatttcctgaaagagggccagctaacctacatcgaatctttgcgtaaaaccaaaggcgagacggcagcagcagaggcggctacaaaactgtttgctgatactatggataagcgccttaaagatatcgcggacagcgcaacgccactcgaaacgatgtggacggatatcaaaaaatgggccgctgactcatggaaatgggtaggcgatcacacggtaggggcgctaaaccttatcgttgatacggtttccgcgatcattaacacgatcaggaagctgattgccgacggcgacgccatgatcgcgcagttcatcgttgacgctggccggaagctgcaaaaaattccaggaatgggcgactttggcaatgaatttctggcgcagcaggagcagctaatcaaggactcgaaagcgaaatccgacacgcttgcaaaaaccattgcggaacagcaggcaaggatcgcaaaaggcgaaatgggttacattgatgccgcgaaggataaaaccctttccggtgggtacagcagcaaaacgaaggatcgcgtaaatcaggaagaaaaagatatcctgaaaaaccgcaacgccaggaagcagcaggtagacgcgggcgttaaaattgatgagcagtatcaggctgaactgctatcgctacaggcgcagctaaaggttttgcagcagcacaaagggcttgacgacaagatcagccagcagcgcaaagactacttcgagacggttgctaaattccaggttttggaagaggcaagccagaagcgaaaactgacccaaagcgaacagcagatgctggcgaacaaaaagaatatcctgtacatggcggaacaaaaggccattgtgggagatcagattgttcagcagcagcgactgaacgccttgcttgacaagtctaccaagtatcaaaaccagatggcggagaagaccaaggcgctacaggataccgccggaatgggtagcaaggagcaggagagataccgggccaatgcgcagatggcggctgactggaaaaacaacggcggatctttaagtgaccctggatttaaagcgatgcaggccgcaagcgataaattctacgcacagcaagatgcgcaaatgatgaactggaaggccgggtttactaacgcgtgggctgacattggcgaagaagttaatgacgtatacaccaatatcggggatatcactaaaaacgcatttaacggcatggcgagcgtgctgactgattttgtcatgactggtaaggccagctttagcgacttcgcaaagagcgtgatcactgacattaccaacatgcttatcaagatggcgctgtttaactcgctttctgccgcgtttggtggtggtggaacgttcagcttcgccagcatgttcagcaaaggcttttctggcggcggttacactggcgacggcgggaagtatgagccaaaaggcgttgttcacggcggggaattcgtattcaccaaagaggcgacgcaaaggttaggcccggaaaacctgtaccgactaatgcgcggctatgcaagtggcggcctggttggtggtaacgcaagttccggatctggaatcaccaacggcggcaacgtcgcggcgtcggcggctatggtgtttaccattggtgatattaacatcacgatgggttccggtcaggatagcaaggggctagagcagggcgtaaggcagatcgtgaacgatatgttcaccgaggctttgagccaaaacgggcgcattgcgaagttcgtcaatgagaaaacgaggaggtagtagtggattcctttaaatggtgtacacaaatccaaggaggggcggcgaaagtcgccgtatccaataacgttcgggcgatcagcttcggaaatggctacatccaaactgcgtcgagcggcattaacacaaagcgccggactgttccgatcgtttatggcggttcggattgggaagcggtttataacttctgtcaggatcacgtaacaaagccttttgtgtggaaggcaccggatggaagaatgggcgtgttcgtcgtaactgccgactccgttaaccttgcgccgcagggtggcggggtgtttgaggtaacggctgaattcgccgaacgcttcacttcagccggataatcaaaaagcgccctttacgggtgcttttttttggcctatgatctggagtcaattagaggagggcttacgatgacagccaatgtttcaaaagattttgcgaactgcctacaaaaacttttccccggcgagatcctaacgctgatcgatatcgacgccacaaagttcggcgggcaggtctaccgattccataacgagaacgtcgcctatacaaccgaggagcttttggccgcggttaacggcgggacgcttcagccaaagatgatcacgtttcgcggcgagcagtacggcccgcgaccgttcggcctgggcgggatcgcaatgtcgagcgatggcacagtggaaaagccaacgctgacggttagcaatattgatgcgcaagcgagtgctcttattcgagcctataacggccttatgcaagccaaagttacggtatgggttttggtcaaggaattgctacaaaacgacggcagcgttaaagagggcgattttaggcgatttatttactacatcgagcgcccaaaacaggtcgacccgcaaaaggcaacgttcgaattaacatccgtgtttgatatggatggattaatgatcccggcccgtctgacgcaaaccgtttgctattgggcgcagcgtgggtggtacaagtctggcaaaggctgcgactacaacgggcagaacggatacttcgacaagttgggaaacagggttgaagacccgtcgcaagatgtttgtggcggcttggtttcttcttgcaggcttcgttttggcaatgaaccgttgagttttggcggttgtgcgacagcaacattgaaaagtggaaggtaatatgttaactccgaaaatcaaaatgcagatcatgcagcacgcgaaagaagtttacccgcatgagtgcgcaggtctggtgacgcaaaaatcacgagtgcaaaaatatcaccgactcgacaacgtttcgccagatcctgagaaagaatcaatgcctgatgaaacgcagtatgcgctggcatcaatggagggcgagccgatcgccttcgttcactcccacactggcgatggggcaaccacaattccgagcgccactgatttatgcttttgcgatgagtctggcttgtcgtgggttatcgtctccatcccggaaggtgatatgcgaatcattgagccgaaacgccgacctctgattggtcgcccctgggctttgggcgcttacgattgctatggcctaatcatggattttcacaagcgccacggcgtcacactaaaagatcggcgattgccgttcgaatggtggaagccggaatacaaagagaatctttaccaggattactggcaagaggacggattcattgaaaacactggcgagcctgaagttggcgatatgatcatcttccagattcaggcggaaaagtggaatcacgctggtatttacgttggaaacaataacatccttcatcacgcgtttggcaagctgtctcgcagggatatctattctggatggtacgagcagcacaaggttttaatttgcaggcacaaggagcttaaacatggcatcacatacaaagacgattaaactatccggttccctggggcgtcggttcggtgtcttccacaaacttgcggttgattcagtcgctgaatgcatccgggcgctgtcttaccaggttgaggggtttaagcctttcatgcagagcaaggttggtttaaatatgcgcttcggcgttgtcgccgacggaaaaccaatcagcgcgaacgaccttgcgacttttgccgtggcgagggagatcagaatcattccgatcccaaaagccagaaagaacggcgggttgttgcaggtcgttatcggagcggcgattatggttgcggccttctttactggcggcggctcgctggcggctatgggcgctttttcatcggctgcattcatggctggcggctcaatggttttgggtggcgtaatgcagatgatcgcaccgcagatgggcggcaatatgcgggcgagcgaatcgcctgagaataagccatcgtatgcgttcggcgggccgattaacaccacggcggcaggttatccaatccagttgccatacggttacagattggctggcggcgcattgttcggttctggatcttacgcagaagacaacaactaattaagccattcgctttttagcctgggggcgtagcctccgggctttttgtcgtgtacaattgcgagactattaacaggaggctaaacgatgactaatatcaaggcccgtaagggaggctcaagcaagccgcgtaccccggtagaaatgccagataacctgatctcaaaagacaagatcaagttattgctggctgtttctgatggcgaggtcgttaacgacttcagtttgaagcagttgcatttcggcggcgtcccggttcaaaacgaagatggaagttacaactatgaaggcgtgattgctgagtttcgccccggcacgcaaacacaggactacatccagggcttcagcgaatcaagtgctgagttccaggttgctcgtgaagtcactcacaacacgccttatacgcttaccgtatcgaacaaaaatctgtctgctattcgctttcgcctgttatggccgcgcgtgctgactcaaaaagataacggcgatatggtcggatcggttgttgagtacaagatcgagatggcggtagatggcgcaagttatcagacctacctaactggcaaaattgacggaaagaacacgactggcggttacgatcggagcattcgcgttaacctgccgcaaaacttcacgtcgcaggttcttatccgcgtgagccgagtaacgccggatgctgacggggtgaaggttgtcgatgccttccaggttcaatcctacgctgaggtcattgatgcaaaattccgctacccgttaacggccatgctttacgttgagttcgatagcgacctgttccagaaccagatcccaaccatctcactcaaaaagaaatggaaaattattcaggttccgagtaattacgatccgattaatcgcacatactccgggacgtgggacggtgtttttaagtgggcgtggagcaataacccggcatgggtgctttatgacctgatcatgaatcagcgctatggtttagaccagcgtgagttaggaatcccggttgataagtggtcgctgtatgaggtggcgcaatactgtgatgaacttgttcctgataatcgcggcgggatggaaccgcgctatttgatggatgtaattgttcaatcgcaggttgaggcgttccagttggtaagggatatttgttccgcgttccgtggaatgacgttctacaacggggaaagcctttcgattatcgtcgataagccgcgcgatccggtgtacctgtttacggctgataacgtcgttgatggcgttttcgttcggacgttcccaagcgaaaagacgatgtacacgtcgtgcaacgtcatgttcgacgacgaagaaaaccagtacgaacaggatgttgaaccagtattcaaccctgacgcagccatgcggttcggccacaacccgaccagcattacagcgatcggatgtaccagaaggacagaggcgaaccgccgtggtcgctggattctgcaaacgaacctaagcgccacaaccgtttcgttttctactggcctggaaggtatgattccttcttgcggcgatgtgatttacgttgcagatccgcattggcaatcggcctttaacctggtgctatcaggccgcgttatggaagtgtctggcgtgcaggtgttccttgcctaccgctgcgacgcgaaggctggcgacactctgatcctgaatacagacgacggcaagccagtgcgccgcacaatcgccagcgtttcggcggacggtaagaccatcacgctaaatgttgggtataactttgacgttgcgcctgacagcgtattcctgatcgagagcgatcagcttgcagcggaacagtatgtagtaacccggattgaaaagggtagtgatgacgacgaatttactttcgccatcacggctacgcagtacgatccgaacaagtatgacgcgatcgataacggggtaattaccgatggccgaccaacttcggttgtcgaccctgattcaatgggcgcaccgaaagacttaacgattagctctttctcccgcattgttcaggggatgagcgtcgagacgatggttatcggatggtctgccgtgcagtatgcaaaactgtacgaggtgcaatggcgcaaggacggtggtaactggaacaacgttccgcgcactgcgacaacgcaggttgatatcgaaggcatctatgctggcgagtatcaggcccgcgtgaggtgcattagcggtgggaatgtagcgtctccgtggtctgaattggcaaccgccacactgaccgggaaagtcggagcgccaaaaggcccgattaacctgtttgcgtcggacaatgagatcttcggcattcgagttaagtgggctatgccggaaggagcggaagacacggcatacattgagctttaccagtcgcaaagcggaaccgatcaggacgcaagcctgcttactctgattccttacccggcggctgaatactggcactcaattttgcccgctggctacgtgaacttctacaaagccagaagcgtagaccggatcggcaatgtttcagaatggactgattacgctcgcggcatgtcgtcgactgacgttaacatcatcacagatgcgatcctggatgaaatcctggatagcgacgcgatgaaggaactacaggaaaacgcacaggatagcgcggcaaaactcaatgactacgcgaacagcatcattcaaaatgcgctggcgaatgatgcggacgttaggaaaatgacgaaggagaacggtaagcgtaaggcagagatcgcgcataccacggtgctgattgccaacgaatcagaagcgagggcggctgaaattacgcaacttaaagcgcagattgatgaagatatcacgtcgcagattacgatccttaacgaagccctggcgacggaaagcgagacgagagcaacgcagattggtcagttgcaggcagattttgcggctgatattgacggcgtaaaaacaacaatgaacgctggttttacgcaggttaatcaggctattgcaaatgaaagtgacgcgcgtgcaagttccgaggcggcactagatgccaaaatcgggcagaactccgcagcgctaaaccagaaactcgactcgtgggcgaacgttaatggcgtcggttccatgtacacgatgaagttgggcttgaggtacaacggtcaggagtatagctccgggatggccctacagcttacctcaagtggtggaagcgttgtttcgcaggtgctgttcattgctgatagatttgctatcatccgtaatgcggcgtctggcgcgtacacgctaccgtttgttgtgcagaatgaccaagtgttcatgaataacgcgcttattcaggacggttcgattaccaacgcgaagatcggtaacgtcattcagtccaacaactttcaggagaatgttgcaggatggaggcttgataaaaacggcgtatttgtcaactatggctcaacttctggcgaaggttccatcaagcaaacgaaccagaacatcactgttcgagatggtagcgggcgcgttcgttgccagttgggtaggatcactggatcatggtaaaattaatgccgggagaaatcccggcttaaccaaaggaggcagacaatggcttatggttttcaatcatgggatgcgaacgggaaccccaacaactatgggatcgtccctgtttcagttgctggatatattgcattagcgcaaggccagaaaagcggaacgtggtattacaacgtcccgcctgggttgaggcttggtttcttttgggtcgcaaatcaagaccagtacggcacatcgaagaggcgaattaccgttagtggtaatcagatcgttgtttcagatgcgccagatgatgcgctggaatcaggcgtctacccggcgacgcaaggttttattgtcgttcaaattatgagttgatgattatggcagattacggaattttacttaccaatgatagcggcaatgtttgggtttcgcctcaaagcatcccactggcactactatcaaagcagagcatcactcttaggggtggtactaactccgatgaagtaagatcggtaacttacgacacgaatcacccatgcgttccgttcgtggtctttcatggatcttcgccacaaggtgcattcacaaaaatcaagtacagcggaaacacttgcagcgttgttttttcttttggtaagcaaaacgtatatgcggaggtttattttttctccgtgttcccacagccaaatcctggttatgggcttgcaatttgggatgaaaacggcacgctgattttgaccaatgaaaccagaacactttcagacgtacagacctacggcactggttttaatctaaacgtcactaacggcgggaagtgggcggttagtcctgttcagttaggcgcgatcgttggtgttgttcgcgatccctacccaagaccatttcagggcgactattgcgcagcggcattctttaacggctcaagcacgcaacttaccgcatatctaacgcaggcaccaggaggagccgccagcgatctaacctacgtcaatatgaaaaacacctgcatcgctattgattgcgcaagatacgactaaaagaaaggggccatacggcccctttttctaccccttgagatttttgatctcctcttttaattcatcaacttgagcagacagagctttgattgcgcaaattgcatccatcaaaagagcattattgtcaagcacaagtttcttattttcaactacgttaccctcatcatcctgataggatgcgctgctttctttaacgtagcacgaatcgatatctcgcacctgctgtgcaataactcccctacgctcgcgtttcttaacatcatccttataggtgaacttgaccagattcattgctttgatgttttcgagtgactgcaaaccatcataagcaacaacattgtctttgtagttaatgtcagatagaccagcaaaaacaacgttgccataagcagtgcttgcaatattaccatctgatttaaactgccaatactgcgtattaccgccagttccccatttgctgacctcaataacggcacgatgttcataacccctatgttcctcaagccacatagcgcaacgcgcaccgttaccattaatgttgaaccgtgagataaatgatggagatttaaggatatcaccattattcccatttggatcgctagttggccacgctacaaaagcatcattaacggtactcctcacagtcccatatgacacaacacttccgcgaagatcggcagccccgccaactcgcaacgtgctcgacattgtaacagcgccgcgaagatcggcagccccgtcagcacgcaacgtgcttgacattgtaacagcattgctaaagtttgcattcaacccggtaacagcaaagttcgatgcatcaaaaacaacctgcttcgcgctgttcatatctccattagggcggaagtacattccttgaccattttcagggattgagtacacgatcgcattgctgttatttgccctaatagtgcaaccgttcagggtcagcgtggcgtttcctccaggaacgctaattgcctgcggctggctgaacgtgttagctacgttggtgcgcgggatcgtattatcattagccatcaaatagtcagacggtgaattatatacaattccagaaggctccgtgtcaatccaggtataaccagtgcgatcaatgattggccccgtaatcgaccctttgttagcctgtacgtttacatgattcaaccacagttcaggaacccatccgccgggagcatgaatataaacatcaaacgaggagtctgtgtttttcaccaccccaagattaatgcgtctggtgtcgtttggtctggcagcaatcagggtgcgctgagtaaaccaagtgtcaatattattactggttagcgtatcgggaagaccgcggccagaaatcgaaaagatatcaaccgggagatttgcagtgccataaccagtacctccgccaatgatgaactgagcaaatgcgtagccatcaccagcgttcttgacgttggcgatcttcatccacttctccccagcgaaagtgccagtaattttatccggcacctggacgccagccacaaggtcgacaacctgatcacgaagattttgcgtctgccccttcgcagtttgcgcgtcgttcttcgccgagttggccgcagtttctgacgcttttgcattggtctccgaggttttggctgcggtttctgatgcctttgcattggtctccgagtttttggccgcagtttctgacgctttggcgttggtctctgaggtcttcgctgcggtttctgatgcctttgcgttagtctccgacgtcttcgcagcattcttggatgcagcagcattggtctctgaagtctttgcagcggtttctgatgcctttgcattggtctccgaggttttggccttattctccgaagatttagcgttcgtctctgaggtcttcgctgcggtttctgacgctttggcgttggtctctgaagtttttgcagcgctttcagacgcagccgcagccgtagcgcttgcgcccgcagcttcggaatctgccctcacctgatcggcaagactttgcagagcttcgaaatcgaagttcttaaagaagtcgacagcatccgcaatttgagtttcctgtgactggtagtagcgcagagtttccgcaacatcttgcgccagtccgtcaacggtcagcgagtcacttaacaggatcgcgtaatcgctagacgctacgacagcgccttttgtggtgatggctttaatttcagtatcgctaaccaccttgtttacgacggccatttgaattggtgacgacaaaaacataatcgtcgcaccagggcgaatcagcgaaagcgatgattgccattttgtgccagtcccggtaacggttccgtctgcggccatagccgctttgccttctctgtatagtgccatgtttttaagcctcattggttgattgagtaacgcagataatagcatcaatgaaccgataaaaaaaggagcctttcggctcctttagttgtcaaattagaacgggatatcatcatcgaaatccatccccgcattcccgccgctgttttgcggcttaggcgcttgttgcggcttgggttgttgaggctggccccacccggattgctgattgccgccgccgctttgcgaaggatcgcgctggctgaattcgagttgcggcataatcatttcgttgtggctgtaaattgtgccgttgtgctcgcggttaacgatctgaagcgtccggcaggttacgctgatcaccttatccatttgcagcgcttcgtcgtaccacttaatcatgttttcttttgcaaagaaaactgcgcggtagttcgtgtaaattgtttcgtcctcgccatcacgattgcggatcttcatccgctccgacaggtctacggcgtacattttccacggcccgttattgttgctgccctctttgacataaggcgcttttcggattacccctgttacaacatgcattgtcattcctatggggcggcttcccgcccgttaaattagttgaaagatgaaatatcttgcgcttctggttcaggttttgattctaccttttccggctcgcgcttcgcaacctcttgcggtttaccggggttaaatccgtttgccggggtgactttcagttctgcctggcgtttggtgatatcgtcttccgtcattttccactccgccggggttaacgtttgtttcgccagcttatagatctcacgaagcgattcgagatcttcgcacgcgtcaatgcgttttttgaagtctttcggtgtcattttcgtaatttctgcatcatcatccgcctgcttgatacctagcgctgcggccagcgcataacggcgggcgtaagatgttgttgagccgtatgcttgttcgacggttttactgatcggcatattgtactgaaacgccatgaactcgccgctttcatgcaaaaacatagtttcgaggtgcatcaccttttcggtgctcgtatccatcatggattgaatgaccataattttgttcttctccagcgccggggaaatagcgtcgaggatatccccaagattcgcataggtgttcccaagatggttgttcttaccgcttttctttgcggccacgaagccagattttgccttgattaatgcggctgcgatggtggtaaatttttcagatgtacgcatgataaagtttccttttcctaattggtaatgcgcactatatcacaagtgcgcaccagtgtttagctatttgtgccgtatacgtccgggaacatgtatttcacaaactgaggagtcggcaaaacaacttccgccgcgtttgactcatatgatggccatgaatcgtgcttcacgcattcagcatactgatgaatcacgctttgatactgtttgcgaccgatctcgatctgctggctggtcagggtgaacgccagcggagcaaacggtgattttttctcctgcgttagcagtctgacaactaccgggcgtttttcgttgtaagtcttcacgaacagatcgcgctgcaatgccatcttgagatagtagcccaagttgaaggcgagtcgcccgaaatcgtcaggcttggaagattgcgtggttttgtagtcggtaatcaccacgacctcgaaaacctcatccgggttgaacccccactccttgatgagttcgggatcggaaacaacgtcaacatgatcgagtcgaaccttaaccttgacgccgaagatctcaccgaagattgacaattcacgctgtgctgtaggcgattcgatacatgcggcgtgtcgcgggttagccagcatcacgctgcgcatttgaacaacggcatcgaaatcaacatccttaaccagcttgcgcccggagtttatcgcggcgctttcgtcgcacagttcaatagcccaccaaacatttacgtcaatcccggcgcgatatgccatttccagaagttccgggtaatccttgttggacgtcccaatcaggccacacgctttcagcttcgcagacagtgccgacttcgacgtaatcagatctttaacctcgcccggagaagtcgcccgcaggtactcgccattaaactttgccgtctcaagcatacaggtatgcgaacaggttccgaacgccagcgcggctgcttcctcacgcactttgaatttccagtgcgccggggatgttgcgtaaatctcgccgaggcttgagccgctaacgtattccgcgcaccaggagttaggatcgtggtaatcatcgttggataattccgcgttggtgtatgccttaaaaattgcttcagccattggtatcactccatttgtggtttcgttgcgttaagtatacgcatgacgattccaggcgcaagtcaaaaagtgctatccgcagttggttaaaaaacgagcgaaatttacgtaagatttagtaagatgcatcttacgtgatttttcctatatatttcatttagttaatgcaaatcggtaagatggtaatatccctataggtaaatatccatgaaaaatatggcgcgaaatccagcgaaaaaagacacgcaccccggagaaatcttaccaagattgatagatacagatagagtaataataataatattgttatttatcatatacttactatctatatattgcggttaattggttaaattttgcgcgaaatttacgtaagattcatcttactaaatcttacctaaagtggttcgaccagctgcaagccactgaatttcaggcataaaaaaaggtaagactgatttgctcaatcttacctaaattctggtcaacatttaatcatagaagcgacgatgccctgtacaacttgcgttcaaatccgagcttaaagttgtcaccgttcggaacgataactttaagatcccgatcgtcagcagccgccagcatatcccgatctccacgacggcaaactacccgcatttctcgcttaccttctccgccattgcctttatacctgtacgccacgatctcgacgtttgaaggtatgatgcaggcccaaacgtcgcacttgaacgaactggcaatattaaagtgcatcgcctcaatccaggatcgagcaaggtaaatcggcccgttaccgtcgtcgctctgattggtcactatcaccgatccgaatgtcagatcgccagccaacatcttctcccgaccctcctcatcaatgaacagcatgttgcaatactcatcatccggcccatcctcatgcactagttgcattggtagcgcgtgaattagctcctgtctgcagttctcgtgagtttttacgccaaccagatatgatttgatatgctcattttcaatgccctcatagagcgttacaggcgtgctatcgacggcctccgttctgtttaaaactgccatcactctttcatgatctgccatctttccgtagtcatacccgttatcacgagctacctgcttgtttctcttgactacgtattcttgcggaacctttccgagatagcgcccaagaatgttgatgcactcgctatacggctggccgcttaacttcattaaccagccgatccccttatcggcaccgcaaccgccacagtatgcgccgccatcacctcgcgtttccagcttgtcagtccagcggaatcggtctttgccgccgcagttcgggcagtcctggtgcttgccgttgaagtatcgagagtggatgccgcaaatgttctgcaacgcctcgcgccacatgccagccatgtacggcaaaacctctttttcatcgtaaaaatccacgtcgtaacccccaaataaaaaacgcctacacgagaatgataacccggcaggcgtttagtgtttagtcaaattgtgctatcggactacgcggagcatttcgcggcggtcgcatcggcgcgtcactggcttgccgttgctgtcaaatcttaaatcaggtcggcagaatgaggcgcgaaaacctttgcaattgttccgtcggtagctcttatgtactagataagcgccatcggctgagatcataccgcgcttacgccactgctgaacaacctggatactaactcccaactcttttgccgttccagcgataccaccgaaggcatcaataaccagctccatccgcgcagtcaacccagctcgaacctcatccttcagcacgtagtaaccagtcggtcgcttgcgtttcttcttatctttcccgcgcgacgttccgttgttgccgttcaaggttcgcttatcaaccattgccatttgctccataattcaaccctcatagcattttttgttaaacctgataaaatgttccatgtattatacacgcaactatgcgaatgacaaattaggattgacaatggcaagcacagaagaagacgtagcatattttaagcgactatttcgttatgaaggcggaacactgattcgcaaagttacaaccagtagtcgtgcattcgctggagactccgtagggtgcgagaacaacgttgggtatttacaggtaagcgtaaaaagcaaacccctatacgttcaccgaatcatttgggaaatgcataatgggcctatcccagaaggaatggagatagatcacatcaaccaggtcagaacagataacagaatcgaaaacctgcgactggtaagccaccaagtaaaccttaaaaaccaatcgatgaacagtggcaatactagcgggcacgctggcgtaagctggtttaagcgaggcggtaagtggagggcaacaataaaggttggcggaaggcaaatacacattggttacttcgcgtcgtttgagtcggcagttgccgcacgaaaagcagcagaaaaacaatatggttttcatgataaccacggagcagagaaaaagaaatgagcttatcgattgagcaacaaatagatctatacgcagacaaaatcccggcaatccaaaagagatttaccgttggaaatatcgttccgtatccatatcaggctgtggcttatattgagacagccaaaagaatagcaaactacaccgcaccgttttacattaaggcttcggtttccgccgggaaaaccatcatgatcgccatgctcgcagcgcagtgcaaggcaatgaacttacccatgatggttcttgctcgccaggccgagatcgtgaagcaggattccgaggagatcagtaacctcgacgttccaaactccgtttattgtgccgggttaggcacgaaggcggcatacttcccgatcgtcgtcggatctgaagggacggtggttaatggcctgtttaaaatgctgggcgactacgtgccttcagttctggctattgacgaatgccaccaggttgactggcaagatctggcggaagcgatcgccaacaatgaatcgttcgagtacatgagccgaccgaaggataagccgtatcgcgtgaacggggaactggtcgatgccgaccacccatacgacgaaaaattcgacgacgtagaattcggcggcggtcgcacgcagtacactatcgtcatttgtgagttaatgcggaggtgccttgagaagacagggcgagaacttcgcatcgttggctatactggttcggagtttcgcggcgtcattccgattttacaggaagacaagagccagcctggtttttggcgcgagcagatcaccgacattaacacaaactatcttgtcgagttcggatcggtggttccgacaatttttggtgatactgaatccgaagggttagggtatgacctatcagaattccacggttccagtcaggacggtacgcaggattttagcgcggaagaattgcgcaagatggaaaagaaaatccatgaatccggcgaaatgacgaagctgattatgcaaaaggtcgtggagcgtgcgaaaacccgaaacggagttctgataacttgcgctggacagcggcattgcaaggaggcggcgagctatctaccgccggacgcaacatacgcgatcatcaccgaaaagacgaactcaaagaaacgcggcgaaattttggataaggcgaatcgcggtgagatcaaatacatcttccaggtgatggccctaaccactggcgttaacgttccattttgggatttttctgtgatattgcgcaagatcgggtcgcttacgttgcttattcagcttttggggcgcggaatgcgacttctgaaggactggcaaaaacagccgccttactcgtgggtgaaagaagatcaccttgtctgggattttgccggaacaatggatgacctgggccagttgtatttcgatccgatcttggagcaggcgcaataccaaagacgcaagagcagcaagaacggcccgaaaatttgcccggtatgcaagggggaaaatagcgagtacgcccgcagatgcattcacaaagacagtaacggcaatcggtgcgaatacttctggatctcgcagaggtgcgaagaccagaaagacccgcgaacagggaagattaaaatcaaggggtgttacgctgaaaatgatattgttgcccgccaatgcagatgctgcggcgttcagcttaaagaccccaatgacaatctcaccgggaagcactatacgcagaatgactggtatgatgttgtctggttcgatatcggcttgactcgcaatcagtccgggatcatcttcaattacgtgttactgaaccatgacggcgagcgattcaccgcaagggaaaagttcttcccggaatcagagaatcagatttgcggcaagctgtggcggcaaaaggcagtcttccagcacgttagcgacgcggtaatgcgtggcaagttgggcggaatgaaaaacgcccgcaagatcctggagtatgcggaatacttccgcgcgccgaagcgcgtaacgcatcgcatcaacggcaagaaggaggacattatttcccgcaaagactttggaggcgaggagtgattacagacaaaggggattacctcgaatattacggcgggcctgtaaaggcttgcccacttgaaaaaatcgaccagatgaacagcgtttcgtggctgcgttacgaataccccgattatctgttctggcatacggttaacgagggtagcaagcacaaggcgagcgccgttgcagatcatcaaatgggattgcttaaaggcgtaagcgatatccttgtgctgattgggctgggcggaaaatacccgttcgccgccattgagctaaagcgccagggtaaatcccaggcatcgccagtgagcaaggagcaacgggaattcctcgccgccgtccgaagccgtggcgggttcgctgccgtggcctatggattcgagcagtttaagatcgcgtttgaagacgcaatcaaatagcactttttgttaaaactacccggcgcgagtcgggtattattctcccatcgaaacgaagaacggagtatttaaaatgaaaaagattattgctttaattgttctatctcttgttctcattggttgtagcgaaaaaccaaaaacatatatttgcggtaatgaatcgtttgaagttactagcgactatattaaggtggttcgcggtaatagcgctggcgttttaattgatggcattggtgaaaaccagtataagctggttacaccacttggaacggctttttatactgttaataaaaacaccattgatattaaagttagcgtttatcagaacactttaacttgcgaggttaagtaataatggcaaaagatatcacagacaaagacactcacgacgcgttcacgactttcgaacagcttgagcgtgaaacgttcataggcaacgcgcttgccactggcggacactatcaggccgtcaagcctgataaattctaccaggtaacgggcaaccgctacgccgggagcaagacgccggatatcgtccgcgacaagtggtcaaccgatcgcagccttattgcttacatggaggagcgttacgggccatacgacctggacgccgccgccgaagaaagcaacaccgtctgccctaagttttacgacgaaaagaccgattgcctcaagcgctggtgggggaaaaataagcacgtatggcttaatccgccttactcgttcccggatccctttgtgctgaaagccattgagcagatggagcatgacaaccagatcgatattttgcttcccggcgacaactctactgcgtggttccgcgacgcacagaaggcagcggctgagatcatttggattgtcgcagacgtcacggaggacgaagacggaacgcaactaagccgatccggtcgcctagccttcatcaacggcctaagcgggaaaccagtcgacaacaacaacaagggtagcgtgattttcatcatgcgcaaactcaagccgggcgaggagcaaaaaacgttctacgtcccggtaagcgaaatctgcccttcattaactaaaaagcgcatgcgcaaacgtgggatctgaaaaatggaacagcttgaatctttcaccgaatacctccacatcgtcgtcactctgctggacaagtacggcttcatcggtacggatgaagaaaagatggccttcgccgatagcatcgatggcacttatcaagaattcatggataacggcacgccgcttgctgactggcccgcgattcttgagcgcgaattgctggattttcgggcgcgtgaaggtgcggaatatttcgcgaaacagcactaattgttaaacaatgcccgccgcgagcgggtattattgttccatcaaccaatcaggagctaacgccatgaacaccaaaaccattgccgacaccatcaagatcgcacaagttaagccgcgcatcgtatctcgccacctgattaacctttctcgcctgtgcatggccgactacgtggcgaagcctttagagaatggccttgatggtgaaatcggtgcgatctacttccgcgccgcgcacggcatcgaagaaattcacatgtacgagcagatggcggaatgcttctgcatttacggtgacgaatgatgattgtagaatctggccgcgctgccgtatggcagcatgccaaagaggctggcattagtgacgatatcgtgatgatcgcaaagtatttcgatatcaaggatatctccattgtgttcaatgggaaatttacctatcttcatgagcgaccactgaagcgaacgcgtatagcggttgcgacgcgggcagaggccgacgcgctgaagatgttcattcacgaatctaagcagaccaaaaaatattacaagtagcgggagtgttgagaatgcgatatattgcgatcctgattacggcggtggttctcactatcgcaatcttcaactacgcaattcaattgggataaattatgcaacctaaaatcacagacgaagaatttttagccgcccgcgaggagggcaagacctaccgcgagatcgccgaagagttcggcatgaacgttcgcagtgttgagcgtcgcggcgttcgacttgcccgccaggggcatttgcacggtaacaatcacgtagcgaagcacatcccggacgggttcggggtcaaaggcacatcgaccatgattcgcgcgaacggtgatgaagttgtgcgctgggtcaagtcagaagtagaccgcgaccgcatgatcgctttgatggaggcggcgcaagcatcattctgcgaagacctacctcgcgctgaaccgcagcctaaggatgaatctaagttttttattgaggatcagctcgccctgtatccgatcttcgatttgcacatcggcgcgatggcccacaagcacgaatgcggcgagaactacgacaccagcacggcggaaagggttcttaaccgcttctttgactactccgtttcggttgccccgcagtcgaaaaagtcggtcttgctggtcggcggtgacttccttcacagtgacggcctggacgcagtaaccccggcaagtggtcacgttctcgatcaggatagccgttacgcgaaacttgtttatgtggctattcgctccttgcgccgagctgtgtcgctactgctgagtaatcacgaagaagtagaggtgcaggtaatcgaggggaaccacgatcaggctggcatgatctggttgcgtgcagcgctcgcagcgttctatgaaaatgagccgcgcgtattcgttgacgtcagccctgcaattatgcatcgtaccgtgtggggcaaaactatgctgggctacactcacggccacacgatgaagaaggcagaaacgcgcctcgccgcaatggctacagacttccgcaaggaatttggtcaatgcgactacatctacacgcattcgggccattggcatcaccagaccgtaacggagcactcgttagggattgacgaagtacacggccagttaggggccaaagacgcttacgccgctcgcggtggttggcgctcatatcgccaggcggcggttattctgtacagcaaagaatatggcgaagtaggccgctttatctaccgcccgaacatgtaaccacaacggccccgcgaggggccaacaaggaaaaccaatgaatagaaatatctgcattttcgatctcgatggcacgttgtccaatggcaaccaccgtttgcacctgctgccgaaaaaagatctccacctaaccgaaagctggacggcgttcaacatggcggctggcggcgacgctcccattacggacacgatccgggtaatggaggccatgcgcgcagcaggatttatcgtcatcatcctgaccgggcgaagtgatgaggcacgcgagatcactgaaaaatggctggtgcaaaatggcgcatcgcattacgacctgctgattatgcgctccgcctccgacaaccggaaagatacggttatcaaagaggaaattttacgcaagattggcattgagcgaatcgttgcagcgtgggatgatagccccactgttattgcgcacttccgtagcctgggtatcacaacttaccaggtctgcgactacggcgaaaaccttcacgaccatctgaaatctcatggagtagacaaatgaaaaatgtaatcatcctcaacggagcgccgggcatcggaaaagacaccatcgcggaaatcatcgcccgcaaatgggagtatcggatcctgagtttcaaatcaccgatgtttgacattgcgcgcgccatcctgggtgcaaccgactttgcccgcttcgccgtccgttaccacgaccgcagccggaaagaagtaaagtgcgactttttaggcgaccgctcgccgcgtgaattcctgattcacattagcgaaaatttcgtaaagccgacgttaggcaaaaagcagttcggcaagttgctttgcgattctgtcgtgaattcgcctgttagttgcgtcgtcagcgacggcggatttgacgaagaagtagagcacatcgcggcgcacgatagcgtaaacgtctttgtcgttcgcctgcatcgtgacggcatgactttcgagggtgatagccgcaagcatattagccgcccggatctgatttgcgaaacttatcacgaattcgattttgatatgacgactggcgagccggaagacgacgcgcaaaaaatccttgatatggttttcgaagggtattaatattctctacgtaatgcctttattatcaccgccttaaactttgggagccttaacaggttcccttttttttgttctttatttggcccaacgcatatatcatcgcattatcacttaactaacagaggttgcatatcatgcgtgaattcatcaacgcggcaaccaatggtagcggcggtgttaccctcgcaggctctgcgaccgggcaacttatcattgcggccattggtttatttttcatgattctattcggctcattcggcgcgtggttgcgctggcgagattcaaaggcgctgcgtgaagcgctggaagccggggatatcaaaacggcggtgaagatcaggagtaaataatatggggattaaaacgcgggttacattcgcagcggcgatggcgatcgctgtcgccttcctcccgaaagtggaggacacgaaatacaaggtttataccgatatcgctggcgtttcgacggtctgcgaaggcatcacagggccggacgtaatcaaggggaaaacctatacccggtcagagtgtgatgcacttttggagaagcacatccaggtcgcaaagcgtgtggttgacagcaaaatcaaagtggccgtgccggacaccttccgggcgtcgatgtacagcttcactttcaacgcgggcggtggcgcatactccggcagcactatgctgaagttgacgaaccaggggcggctatatgaggcgtgcgaacagctttaccgctggacgtactatcgcaacccgaagacgggcaagatggaaaaatcgcgcggcctgcataatcgccgggatcaggaattcaatctttgcattaaggatctaaaatgagtagcttaaattttcagcgagcattggcaatcggcttcatcgtgtgggcggtcgcactggtttccggttgtgcttccagcgtcccgatcctttccgatctggtgggcagcaagccggatatgacggcgcaagtcggtgcggagaacgtgaaacaggcggttggcgtgacgaacaaaacggacacgtccagcaagcaggaaacgaccttcaaagaatcggcagttggcaaggttgacacttccaacaaaaaggcggtgacgacctccagcattcacgcgaaccagattacggcggagaagatcgagatccgaaacgacggtagcggaagtgtgattccgtggctgattggtgcagttggtgccatcatgttcgctgtcggtgttttcggtatgtggcgggaacgaaaaaataaaggggcgtaagccccttttttcatatgtaccgtttgacgtgcagcagcgccacgccatcttcatcattcaacccatgttcaaccttgtttgtcgcggccatgccttgatatagcaaggtgagcgcggcacgcaagtaattttctggtgtgatctgattcacgcaaacaagcctgtgaacctccgttatcagatcttccacctgctttcccgaatagggcttcatcgtcgagttgctcaatgtgcatcatctcccacatgtatttgttttccatcccttcaaacgaccggaagttaaatccaatctccctgttatccgggccagtgcaccacaccacgccgttttttccgtccaggtatccattcgtatagcttcgcgctaaaaactccttagaaaccattgaggcgaacatacggtgtgacacgttggcagcttttgccatgcgtggcgattcgcggtgcatgtaaacgaacttcgcaaaatcttgccgggtaaattcccggcgagactcgcagaatcggtaaatgtcaaggataaacattcattacctcatgaacgaaggattaacgaacacttccgaatcaatcacgcagacgaaacctaattcctccatcttcggcagcaatttttccttaatccttttactcaccccggactgacctttgaagatcttcagattgcggcacgcgttatagatgctctgaacagtcatcacgcctttcgactgcttgcaacggctggcgataacatcgtacacggccttaatctccgcaccctcaccagcgaagccggacgaatcagccgacgacaaatacgttttgctcaactcatgaaacatgatgatggcttcgtcgatcgtttcggttccgatcttcttcgagcgcttgccgccaggttgccagttgcggatagtgtggattaccgacgccaggcgcatcacctgcttatcgaatttacccatcgcaccgcgcagcatcgtatgcgaatacttcccgccgtcgcctaattccggctctaactcctggcgggccttgttcagccgacgcatgcctgcttcagtcacttccagcttgatatacgattcagtcataatgtcatgaatgaggcggaagtaatcagcgcgtaaagacttgtcgatcggctcataggtcgaattccctttttcgtcaatgaacacacgctcacctaaccgcgtttgctcgcgaaccaaaaggaaacgctctgatacaccgataccgcgagaaccagcttgcatgatggcgtcgatggtttcatcctgggcgattacgcaaatacagcccagcgcgacgaatgacatattgttactgacgtcggaacgtgcgatcgatacgtggcccttatcccacgccttcaacaccagttcgctgttcgtcttcttgccgccgtcgttgccatacgtgatccctaacaggctgttaaccgccgtcgcttcgtccgagataaccgcaaagttgccttgccgattgttgattttcgccaggccttccggcgtggtatcggagacggggaaggtcagatcgcacatgctttctaacttctcctcaagttcgtctttgtcttcgaacagtttcgccatatcagactgcgataactcgcctttcatggcctgcttgttggcggacaacttcgccatgattttcttgcgctctttcttgcgcgcctcgttgattcgctcaacctctgcgacgatcggatcgatagccagcgagttaatcgcagacttaccagcggaaggcggctgcgacgtaatgacgtaaagcgtcgtcggttgctcgctgccgtggtactccacccaaaagcgacccatcatcgcggcggacacggttcctaggaaatgcatataagccgatgattccgggaattgaacggagcgagcggcattgagcgccagcttgccgacgatatcgtaatcattcgcgatcgagatcgtgggatacttgtccgcgtttacgtcgatatctttcggcttgggccagaaagaaacggagtcgcgatacccgttcgcacggatggcgacgcgcaaggggctgatgccttccttctctgcgatggcaataatatcttgtggggacacgcggtcatttaaaaacatgccttgctcctgattggttaatcgtgcggctaatgataagccgtcttaaatccgagatccagtgataatctaaacgcacttgcaaaatgtgcttaggttatcggggcgcatggccccgaatccgttacaggtatttcgcctcaaacgtggtgccgtccgacacgctgaaaccgacttcctcacggtagagcgtccagcggcaaccgtcacggtcgaagatgtatccggcgactccgcccagcgcacgaccgctttccacctggtaacgcttgccgacggtgaaggattttttcaccgggtttttgtggtcgaggccaacgcatttcagggttttcgttttcagctcgataaacgtcgccaccaccacgccgccgacgccagcaataaacaactcaccgctaatgccgaccgacaagcaaactcgcttcttcttcagttcggcactgttatataccatcattgacacgttgccttcgtcgtcaatgcgagcggaataaaggttgttttcctggatattaacagcactgcttgaggtgcatttaattttgattgactttgccattttatttcctgtctcccatttcgatatagaggtttaccagatccagaaagtcggatttgtttctgcaactcaatttaaagccaacgtgcgattcgatcttattttgcatcgctgccatcgttgcgccgccgttattcattttcaaaacttcgcggcatacatcggccagttttttagatatcatatttcaccaccgtaattttcgtgtttttgcaagcgtcttcgatatcgctgattaagcgcttcacccggatatcaatcattgttttgtggtgcatgacgtcaacaatcccgcaaacgcacaagatcatgattgcaaagaggaagccgcctgggcaagtcattgataatgcagttgctaacagcgcgataattaatttcattttgtttgcctcgttttgtttcgatggagtaactatacccgcaattaagcgggtacgtttagcaattcgtgctattcattaaaattagcctggaacacggcgcgagcgaatccgcgcggagtgatagaacgaagcatctttgttctttcagacttgccgccaaggaatttccacgcccaaaagaaatcgacgccttccacgccttcaggcggcaataaccgctttggctccacgaatccgttaccgtgccagatgcacgttttcttcgtgtaattgtcgcagtgcggcatttttgggtgccaaacttcctcatgcggcgcaacataccctccgaagtcgcgagggtggaaataaaaatccggcttgcgccaaagagtcgacaatttgccaaccgggttttctaccatccagggacaattatattggtcgcccaattgctcgatcatcttcgcatcatcggcggctgatagcacatcctgagtctgccgggcgtgcttcaccccgctatgcgctaacagcgtgcaggacgggaaagcgaaaataatgtcaggatccgggatgcccaggatcgtgcgcttcacgtcgaaatctttgtcaatccacatgttgacatactggattttggcatgctccatgcggattttgtactcgccgtggtcgccggaatcggcattgaagcaatacacatcgcaaccgcgaattgcccacggtagacccataatcccggaaccgtcaaacatgcaccacacaacgcgctttttcatcgtcacctcaccagaaagggatacattcgcggcaaccttcttcaccagtgcagccgcaactattttcttcttgctctgccagatcgtcacgcatcggcagactttcggcatccatatccatactgcccagggcatccgatagcgtcatttcctgattggctactttgatgcaatattcgcggttaagccctgcgtcctgggcggttaagaaacggtgccagtaggcatcgtcgtaattatcagccatttcttttcctccggttaaattctcgcaaactggcggcgcatgacttcgaacaggttttaccccagccacgtttaagatccgccgcctttaccttatagacggccccgcatcctggagcctcgcagcacttcatactttccttcgccccgatgtgatccggtcgaccagtcagggagctatcgccgggattcttcgtcgaccagaaaagttgcactgtcgcgacctcctcgccgaactcattaacgaacatgtaaacgcccttgcttttcagaagcacggtgcaatgatgcatttcgccgttgacttccaggtatgcgcgatcgccttctttcattagcttctccacgattcaatgaacatgctgttcgattccagcgtcagcgtgacgccagccagggaggacggaatcaggcgagcgcccggaaccgttccgacaacatagcgaccattcgatttggtaatcgtgatctgagtaaagccggattcgcggttcatgcggagaacgacgcggccatgtgcgttcagtacggcgagaatggaatcagtcttcggatggttcattgtgtaactccttcgtttgttggtgtggggacagtatgccactatccccaaattctgttttagcaattcgtgctattcgggaacgcaggtcgtgtaatcctggcagatgtagattgtgcgctgaacacgctgcgcggcatcctccaggctctgaatctcgatatcgttgctgtcgacccggcagggtgttgcaccgaagatgaaataccccgtctgcttgtcgttgatttgccacgccttgctttcgggaaccgtattgacgacaaacggcgtgtcgtcggctttgaagtcttcagggtgacgcccgtaatagtggatgattgcagcagttgccgccgccttaaacttttccgtcacgtcacgggcggcgatatcacgcgagatctggatatcaacatccggcgcgccgaccatgtaggtaaagctgttcgaaatggtaactgttctcatttatattttaacctcgtttcggtggatgaagtcggcgacatagtggcactcgatcgggttttcgatcccggcgagaacctcacagcgcccgttgttcagtaactggcaatgctggcaatcagacccgccaacattagctatgacgatggcgatcccgttgcatgaaccgccaaacattctgtgcgggaaggggtaagcctcgcaggtgcaaaccacctccccggccctccgctttctcatgcgctccccttctcgatgcagaagacccaatcgcgagcatcaaccgcgaagcgtgccacgccgtcgagcacgatgaaaacggtctgcccgttaacgccgcgacccttctcaatatcggtgacggtgcggaacaggtcgcttgcgccatattgaattttgtccccgattacgacgtcgccaaatgctttcatggttgatctcctgactggtttcgatgggttaactataccaggccttgcggcccggcgtttagcaattcgtgcttatttcactgctttcttcgctgccttgtacgcctctttgaaggccggaacatcttcgaccggaatccagaagccggatccataaccatcgtcatagcaagggcattggtcgcagtagtcgccccaggttttctcttcgccgccgacagagaatccagtggccattttgcataacgcttcctcaaccgcttcgatcttgtcggcgtcgctatccatgataacgaagttccacttgccgttatactcgctgcccaggttgattgattcgcgttgaagtttcatagctttagctcctttggctcaattcgtttcgttgaagtaatcatagcaaagtcgatcggatggcttttaacaaaaaatgctattcctgcgattgctgattattccaccgattcggaatagtggaatagatggtgattgcatttgattcactggtgattacttttgacgaatcatgattgcttgtgattgtttcattctgtgcaattacttggggaagtgtttcatgatttgcaacgaattgcata

SEQ ID NO: 4 - DNA, 34 bp, synthetic construct
  source 1..34: mol_type = other DNA
gtcccattcgccaatgactaatatcaaggcccgc

SEQ ID NO: 5 - DNA, 40 bp, synthetic construct
  source 1..40: mol_type = other DNA
gcctatggaaaaacctagactactattctatttccttttc

SEQ ID NO: 6 - DNA, 36 bp, synthetic construct
  source 1..36: mol_type = other DNA
cactggatcatggtaagtttttccataggctccgcc

SEQ ID NO: 7 - DNA, 32 bp, synthetic construct
  source 1..32: mol_type = other DNA
ttgatattagtcattggcgaatgggacgcgcc

SEQ ID NO: 8 - DNA, 18 bp, synthetic construct
  source 1..18: mol_type = other DNA
gtgtagcggtcacgctgc

SEQ ID NO: 9 - DNA, 22 bp, synthetic construct
  source 1..22: mol_type = other DNA
aggagcatcgatacgaacctga

SEQ ID NO: 10 - DNA, 22 bp, synthetic construct
  source 1..22: mol_type = other DNA
ttatagtcctgtcgggtttcgc

SEQ ID NO: 11 - DNA, 28 bp, synthetic construct
  source 1..28: mol_type = other DNA
ctgtatgccgatatgtatgccctctctc

SEQ ID NO: 12 - DNA, 28 bp, synthetic construct
  source 1..28: mol_type = other DNA
atgtatgccctctctctgataaaaccag

SEQ ID NO: 13 - DNA, 72 bp, synthetic construct
  source 1..72: mol_type = other DNA
ggaagggggaaatagaattctacagtatagacnnknnknnknnknnkggtacaagagcatacgcgctacgtg

SEQ ID NO: 14 - DNA, 32 bp, synthetic construct
  source 1..32: mol_type = other DNA
gtctatactgtagaattctatttcccccttcc

SEQ ID NO: 15 - DNA, 64 bp, synthetic construct
  source 1..64: mol_type = other DNA
aagagaataggatcatcgttagggtannknnknnknnknnknnkagcagcataaaaacattcac

SEQ ID NO: 16 - DNA, 30 bp, synthetic construct
  source 1..30: mol_type = other DNA
taccctaacgatgatcctattctcttgccc

SEQ ID NO: 17 - DNA, 75 bp, synthetic construct
  source 1..75: mol_type = other DNA
agcagcataaaaacattcactccannknnknnknnknnknnknnknnknnkggacaagaaacgtctgatggagtc

SEQ ID NO: 18 - protein, 5 aa, Klebsiella phage
TGNDG

SEQ ID NO: 19 - protein, 5 aa, synthetic construct
NGNDG

SEQ ID NO: 20 - protein, 5 aa, synthetic construct
TGNAG

SEQ ID NO: 21 - protein, 5 aa, synthetic construct
TGNNG

SEQ ID NO: 22 - protein, 5 aa, synthetic construct
TGDDG

SEQ ID NO: 23 - protein, 5 aa, synthetic construct
TGTDG

SEQ ID NO: 24 - protein, 5 aa, synthetic construct
TENDG

SEQ ID NO: 25 - protein, 5 aa, synthetic construct
AGNDG

SEQ ID NO: 26 - protein, 5 aa, synthetic construct
TGNEG

SEQ ID NO: 27 - protein, 5 aa, synthetic construct
TGSDG

SEQ ID NO: 28 - protein, 5 aa, synthetic construct
TGHDG

SEQ ID NO: 29 - protein, 5 aa, synthetic construct
PGNDG

SEQ ID NO: 30 - protein, 5 aa, synthetic construct
TGNDE

SEQ ID NO: 31 - protein, 5 aa, synthetic construct
TRNDG

SEQ ID NO: 32 - protein, 5 aa, synthetic construct
RRPGL

SEQ ID NO: 33 - protein, 5 aa, synthetic construct
TGNDR

SEQ ID NO: 34 - protein, 5 aa, synthetic construct
NRNDG

SEQ ID NO: 35 - protein, 5 aa, synthetic construct
PGHDG

SEQ ID NO: 36 - protein, 5 aa, synthetic construct
SGNDG

SEQ ID NO: 37 - protein, 5 aa, synthetic construct
TGNDV

SEQ ID NO: 38 - protein, 5 aa, synthetic construct
IGNDG

SEQ ID NO: 39 - protein, 5 aa, synthetic construct
TVNDG

SEQ ID NO: 40 - protein, 5 aa, synthetic construct
TCNDG

SEQ ID NO: 41 - protein, 5 aa, synthetic construct
TGKDG

SEQ ID NO: 42 - protein, 5 aa, synthetic construct
TGNYR

SEQ ID NO: 43 - protein, 5 aa, synthetic construct
TGTEG

SEQ ID NO: 44 - protein, 5 aa, synthetic construct
TRNNG

SEQ ID NO: 45 - protein, 5 aa, synthetic construct
AGHDG

SEQ ID NO: 46 - protein, 5 aa, synthetic construct
AGNDR

SEQ ID NO: 47 - protein, 5 aa, synthetic construct
CRPGL

SEQ ID NO: 48 - protein, 5 aa, synthetic construct
NGNAG

SEQ ID NO: 49 - protein, 5 aa, synthetic construct
NGNGG

SEQ ID NO: 50 - protein, 5 aa, synthetic construct
NGTDG

SEQ ID NO: 51 - protein, 5 aa, synthetic construct
NRTEV

SEQ ID NO: 52 - protein, 5 aa, synthetic construct
NVNDG

SEQ ID NO: 53 - protein, 5 aa, synthetic construct
PGDDG

SEQ ID NO: 54 - protein, 5 aa, synthetic construct
PGNDE

SEQ ID NO: 55 - protein, 5 aa, synthetic construct
PGRAG

SEQ ID NO: 56 - protein, 5 aa, synthetic construct
PGTDG

SEQ ID NO: 57 - protein, 5 aa, synthetic construct
TENEG

SEQ ID NO: 58 - protein, 5 aa, synthetic construct
TGDAG

SEQ ID NO: 59 - protein, 5 aa, synthetic construct
TGHAG

SEQ ID NO: 60 - protein, 5 aa, synthetic construct
TGNAR

SEQ ID NO: 61 - protein, 5 aa, synthetic construct
TGNGG

SEQ ID NO: 62 - protein, 5 aa, synthetic construct
TGNYG

SEQ ID NO: 63 - protein, 5 aa, synthetic construct
TGTDR

SEQ ID NO: 64 - protein, 5 aa, synthetic construct
TRDDG

SEQ ID NO: 65 - protein, 5 aa, synthetic construct
TRHDG

SEQ ID NO: 66 - protein, 5 aa, synthetic construct
TRNDE

SEQ ID NO: 67 - protein, 5 aa, synthetic construct
TVTDV

SEQ ID NO: 68 - protein, 5 aa, synthetic construct
VINVS

SEQ ID NO: 69 - protein, 5 aa, synthetic construct
TGHDV

SEQ ID NO: 70 - protein, 5 aa, synthetic construct
TGNRS

SEQ ID NO: 71 - protein, 5 aa, synthetic construct
AGDDG

SEQ ID NO: 72 - protein, 5 aa, synthetic construct
PGNER

SEQ ID NO: 73 - protein, 5 aa, synthetic construct
RSEER

SEQ ID NO: 74 - protein, 5 aa, synthetic construct
TDRKS

SEQ ID NO: 75 - protein, 5 aa, synthetic construct
TEIGR

SEQ ID NO: 76 - protein, 5 aa, synthetic construct
TEMTE

SEQ ID NO: 77 - protein, 5 aa, synthetic construct
TETDG

SEQ ID NO: 78 - protein, 5 aa, synthetic construct
TETNG

SEQ ID NO: 79 - protein, 5 aa, synthetic construct
TGDRK

SEQ ID NO: 80 - protein, 5 aa, synthetic construct
TGKDR

SEQ ID NO: 81 - protein, 5 aa, synthetic construct
TGNDK

SEQ ID NO: 82 - protein, 5 aa, synthetic construct
TGNED

SEQ ID NO: 83 - protein, 5 aa, synthetic construct
TGNEI

SEQ ID NO: 84 - protein, 5 aa, synthetic construct
TGPDG

SEQ ID NO: 85 - protein, 5 aa, synthetic construct
TGRSE

SEQ ID NO: 86 - protein, 5 aa, synthetic construct
TRNAG

SEQ ID NO: 87 - protein, 5 aa, synthetic construct
TRSEE

SEQ ID NO: 88 - protein, 5 aa, synthetic construct
TRTDG

SEQ ID NO: 89 - protein, 6 aa, Klebsiella phage
TQSGRG

SEQ ID NO: 90 - protein, 6 aa, synthetic construct
PQSGRG

SEQ ID NO: 91 - protein, 6 aa, synthetic construct
TQNGRG

SEQ ID NO: 92 - protein, 6 aa, synthetic construct
TQRGRG

SEQ ID NO: 93 - protein, 6 aa, synthetic construct
TPSGRG

SEQ ID NO: 94 - protein, 6 aa, synthetic construct
AQSGRG

SEQ ID NO: 95 - protein, 6 aa, synthetic construct
GQPILR

SEQ ID NO: 96 - protein, 6 aa, synthetic construct
NQSGRG

SEQ ID NO: 97 - protein, 6 aa, synthetic construct
SQSGRG

SEQ ID NO: 98 - protein, 6 aa, synthetic construct
SRKALE

SEQ ID NO: 99 - protein, 6 aa, synthetic construct
TCFVLF

SEQ ID NO: 100 - protein, 6 aa, synthetic construct
TESGRG

SEQ ID NO: 101 - protein, 6 aa, synthetic construct
THSGRG

SEQ ID NO: 102 - protein, 6 aa, synthetic construct
TQSGGG

SEQ ID NO: 103 - protein, 6 aa, synthetic construct
TQSGKG

SEQ ID NO: 104 - protein, 6 aa, synthetic construct
TQSGMG

SEQ ID NO: 105 - protein, 6 aa, synthetic construct
TQSGSG

SEQ ID NO: 106 - protein, 6 aa, synthetic construct
TQSRRG

SEQ ID NO: 107 - protein, 6 aa, synthetic construct
TQSWRG

SEQ ID NO: 108 - protein, 6 aa, synthetic construct
TRSGRG

SEQ ID NO: 109 - protein, 6 aa, synthetic construct
TKSGRN

SEQ ID NO: 110 - protein, 6 aa, synthetic construct
TQSGRD

SEQ ID NO: 111 - protein, 6 aa, synthetic construct
TQSGRS

SEQ ID NO: 112 - protein, 6 aa, synthetic construct
KIGRAH

SEQ ID NO: 113 - protein, 6 aa, synthetic construct
RSEEHT

SEQ ID NO: 114 - protein, 6 aa, synthetic construct
RSEERR

SEQ ID NO: 115 - protein, 6 aa, synthetic construct
TDRKST

SEQ ID NO: 116 - protein, 6 aa, synthetic construct
TQIGRA

SEQ ID NO: 117 - protein, 6 aa, synthetic construct
TQRDRK

SEQ ID NO: 118 - protein, 6 aa, synthetic construct
TQSEIG

SEQ ID NO: 119 - protein, 6 aa, synthetic construct
TQSGDR

SEQ ID NO: 120 - protein, 6 aa, synthetic construct
TQSGKI

SEQ ID NO: 121 - protein, 6 aa, synthetic construct
TQSGRE

SEQ ID NO: 122 - protein, 6 aa, synthetic construct
TQSGRR

SEQ ID NO: 123 - protein, 6 aa, synthetic construct
TQSGRV

SEQ ID NO: 124 - protein, 9 aa, Klebsiella phage
WVERDNGTT

SEQ ID NO: 125 - protein, 9 aa, synthetic construct
WVERDNGNT

SEQ ID NO: 126 - protein, 9 aa, synthetic construct
WVERYNGTT

SEQ ID NO: 127 - protein, 9 aa, synthetic construct
WVARDNGTT

SEQ ID NO: 128 - protein, 9 aa, synthetic construct
WVERDNETT

SEQ ID NO: 129 - protein, 9 aa, synthetic construct
WVGRDNGTT

SEQ ID NO: 130 - protein, 9 aa, synthetic construct
FKVAQLCQV

SEQ ID NO: 131 - protein, 9 aa, synthetic construct
GVERGNGTT

SEQ ID NO: 132 - protein, 9 aa, synthetic construct
LVFAGDGSL

SEQ ID NO: 133 - protein, 9 aa, synthetic construct
RRVKVFLLT

SEQ ID NO: 134 - protein, 9 aa, synthetic construct
RVERDNGTT

SEQ ID NO: 135 - protein, 9 aa, synthetic construct
SGAVPSTWG

SEQ ID NO: 136 - protein, 9 aa, synthetic construct
WAERDNGTT

SEQ ID NO: 137 - protein, 9 aa, synthetic construct
WGERDNGTT

SEQ ID NO: 138 - protein, 9 aa, synthetic construct
WIERDNGTT

SEQ ID NO: 139 - protein, 9 aa, synthetic construct
WVEGDNGTT

SEQ ID NO: 140 - protein, 9 aa, synthetic construct
WVERDHGTT

SEQ ID NO: 141 - protein, 9 aa, synthetic construct
WVERDNGAN

SEQ ID NO: 142 - protein, 9 aa, synthetic construct
WVERDNGTN

SEQ ID NO: 143 - protein, 9 aa, synthetic construct
WVERDNRTT

SEQ ID NO: 144 - protein, 9 aa, synthetic construct
WVERGNGTT

SEQ ID NO: 145 - protein, 9 aa, synthetic construct
WVESDNGTT

SEQ ID NO: 146 - protein, 9 aa, synthetic construct
WVEREIGRA

SEQ ID NO: 147 - protein, 9 aa, synthetic construct
DRKSTRLNS

SEQ ID NO: 148 - protein, 9 aa, synthetic construct
GVERDNGTT

SEQ ID NO: 149 - protein, 9 aa, synthetic construct
LRDRRSLVV

SEQ ID NO: 150 - protein, 9 aa, synthetic construct
RSEEHKSEL

SEQ ID NO: 151 - protein, 9 aa, synthetic construct
RSEERRVGK

SEQ ID NO: 152 - protein, 9 aa, synthetic construct
WRSEEHTSE

SEQ ID NO: 153 - protein, 9 aa, synthetic construct
WRSEERRVG

SEQ ID NO: 154 - protein, 9 aa, synthetic construct
WVDRKSTRL

SEQ ID NO: 155 - protein, 9 aa, synthetic construct
WVEIGRASC

SEQ ID NO: 156 - protein, 9 aa, synthetic construct
WVEKDNGTT

SEQ ID NO: 157 - protein, 9 aa, synthetic construct
WVEKIGRAH

SEQ ID NO: 158 - protein, 9 aa, synthetic construct
WVEKIGRAS

SEQ ID NO: 159 - protein, 9 aa, synthetic construct
WVERDKDRK

SEQ ID NO: 160 - protein, 9 aa, synthetic construct
WVERDKIGR

SEQ ID NO: 161 - protein, 9 aa, synthetic construct
WVERDNEIG

SEQ ID NO: 162 - protein, 9 aa, synthetic construct
WVERDNGAT

SEQ ID NO: 163 - protein, 9 aa, synthetic construct
WVERDNGDR

SEQ ID NO: 164 - protein, 9 aa, synthetic construct
WVERDNGKI

SEQ ID NO: 165 - protein, 9 aa, synthetic construct
WVERDNGTR

SEQ ID NO: 166 - protein, 9 aa, synthetic construct
WVERDNRSE

SEQ ID NO: 167 - protein, 9 aa, synthetic construct
WVERDRKST

SEQ ID NO: 168 - protein, 9 aa, synthetic construct
WVERDRKSV

SEQ ID NO: 169 - protein, 9 aa, synthetic construct
WVERDRSEE

SEQ ID NO: 170 - protein, 9 aa, synthetic construct
WVEREDRKS

SEQ ID NO: 171 - protein, 9 aa, synthetic construct
WVERRSEEH

SEQ ID NO: 172 - protein, 9 aa, synthetic construct
WVERRSEER

SEQ ID NO: 173 - protein, 9 aa, synthetic construct
WVERSEEHT

SEQ ID NO: 174 - protein, 9 aa, synthetic construct
WVRSEEHTS

SEQ ID NO: 175 - protein, 9 aa, synthetic construct
WVXRDNGTT

SEQ ID NO: 176 - protein, 10 aa, Klebsiella phage
QETSDGVIYN

SEQ ID NO: 177 - protein, 10 aa, synthetic construct
QETPDGVIYN

SEQ ID NO: 178 - protein, 10 aa, synthetic construct
QETSDGVLYN

SEQ ID NO: 179 - protein, 10 aa, synthetic construct
QETHDGVIYN

SEQ ID NO: 180 - protein, 10 aa, synthetic construct
QETSAGVIYN

SEQ ID NO: 181 - protein, 10 aa, synthetic construct
HETSDGVIYN

SEQ ID NO: 182 - protein, 10 aa, synthetic construct
KGCVGCLWVV

SEQ ID NO: 183 - protein, 10 aa, synthetic construct
LDRSLCLRGS

SEQ ID NO: 184 - protein, 10 aa, synthetic construct
QDPSDGVIYN

SEQ ID NO: 185 - protein, 10 aa, synthetic construct
QEKPDGVIYN

SEQ ID NO: 186 - protein, 10 aa, synthetic construct
QEMSDGVIYN

SEQ ID NO: 187 - protein, 10 aa, synthetic construct
QEPSDGVIYN

SEQ ID NO: 188 - protein, 10 aa, synthetic construct
QEPSNGVIYN

SEQ ID NO: 189 - protein, 10 aa, synthetic construct
QETSDGAIYN

SEQ ID NO: 190 - protein, 10 aa, synthetic construct
QETSDGVICN

SEQ ID NO: 191 - protein, 10 aa, synthetic construct
QETSDGVIYH

SEQ ID NO: 192 - protein, 10 aa, synthetic construct
QETSDGVIYK

SEQ ID NO: 193 - protein, 10 aa, synthetic construct
QETSDGVIYT

SEQ ID NO: 194 - protein, 10 aa, synthetic construct
QETSDGVVYN

SEQ ID NO: 195 - protein, 10 aa, synthetic construct
QETSNGVIYN

SEQ ID NO: 196 - protein, 10 aa, synthetic construct
QETYDGVIYN

SEQ ID NO: 197 - protein, 10 aa, synthetic construct
QGTSDGVIYN

SEQ ID NO: 198 - protein, 10 aa, synthetic construct
QKTSDGVIYN

SEQ ID NO: 199 - protein, 10 aa, synthetic construct
RIRLLLSVRF

SEQ ID NO: 200 - protein, 10 aa, synthetic construct
RTMFMQTCVS

SEQ ID NO: 201 - protein, 10 aa, synthetic construct
RVRQTWPGSG

SEQ ID NO: 202 - protein, 10 aa, synthetic construct
RWFPGESEVC

SEQ ID NO: 203 - protein, 10 aa, synthetic construct
SGCTRIKSVS

SEQ ID NO: 204 - protein, 10 aa, synthetic construct
SWFSRLPLVG

SEQ ID NO: 205 - protein, 10 aa, synthetic construct
TGSTIHVMNS

SEQ ID NO: 206 - protein, 10 aa, synthetic construct
VYRESSGSKV

SEQ ID NO: 207 - protein, 10 aa, synthetic construct
WTLKLWVVML

SEQ ID NO: 208 - protein, 10 aa, synthetic construct
LTGSEVWIVK

SEQ ID NO: 209 - protein, 10 aa, synthetic construct
PLASFWRSSL

SEQ ID NO: 210 - protein, 10 aa, synthetic construct
QDRKSTRRTP

SEQ ID NO: 211 - protein, 10 aa, synthetic construct
QDTPYGVIYN

SEQ ID NO: 212 - protein, 10 aa, synthetic construct
QEDRKSVVEG

SEQ ID NO: 213 - protein, 10 aa, synthetic construct
QETPAGVIYN

SEQ ID NO: 214 - protein, 10 aa, synthetic construct
QETPDGAIYN

SEQ ID NO: 215 - protein, 10 aa, synthetic construct
QETPDGVIYK

SEQ ID NO: 216 - protein, 10 aa, synthetic construct
QETPDGVIYR

SEQ ID NO: 217 - protein, 10 aa, synthetic construct
QETPNGVIYN

SEQ ID NO: 218 - protein, 10 aa, synthetic construct
QETSDGDRKS

SEQ ID NO: 219 - protein, 10 aa, synthetic construct
QETSDGVDRK

SEQ ID NO: 220 - protein, 10 aa, synthetic construct
QETSDGVIRS

SEQ ID NO: 221 - protein, 10 aa, synthetic construct
QETSDGVIYS

SEQ ID NO: 222 - protein, 10 aa, synthetic construct
QETSDRVIYN

SEQ ID NO: 223 - protein, 10 aa, synthetic construct
QETSRSEEHT

SEQ ID NO: 224 - protein, 10 aa, synthetic construct
QETYDGVVYN

SEQ ID NO: 225 - protein, 10 aa, synthetic construct
QIGRASCRER

SEQ ID NO: 226 - protein, 1237 aa, Klebsiella phage
MPDNLISKDKIKLLLAVSDGEVVNDFSMKQLHFGGVPVQNEDGTFNYEGVIAEFRPGTQTQDYIQGFSESSAEFQVAREVTHNTPYTLTVSNKNLSAIRFRLLWPRVLTQKDNGDMVGSVVEYKIEMAVDGASYQTYLTGKIDGKNTTGGYDRSIRVNLPQNFTSQVLIRVSRVTPDADGVKVVDAFRVESYAEVIDAKFRYPLTAMLYVEFDSDLFQNQIPTISLKKKWKIIQVPRNYDPINRTYSGTWDGTFKWAWSNNPAWVLYDLIMNQRYGLDQRELGIPVDKWSLYEVAQYCDELVPDNRGGMEPRYLMDVIVQSQVEAFQLVRDICSAFRGMTFYNGESLSIIVDKPRDPVYLFTADNVVDGVFVRTFPSEKTMYTSCNVMFDDEENQYEQDVEPVFNPDAAMRFGHNPTSITAIGCTRRTEANRRGRWILQTNLSATTVSFSTGLEGMIPSCGDVIYVADPHWQSAFNLVLSGRVMEVSGVQVFLAYRCDAKAGDTLILNTDDGKPVRRTIASVSADGKTITLNVGFNFDVAPDSVFLIESDQLAAEQYVVTRIEKGSDDDEFTFAITATQYDPNKYDAIDNGVITDSRPTSVVDPDSLGAPKDLTISSFSRIVQGMSVETMVIGWSAVQYAKLYEVQWRKDGGNWNNVPRTATTQVDIEGIYAGEYQARVRCISGGNVASPWSALASASLTGKVGAPKGPINLFASDNEIFGIRVKWAMPEGAEDTAYIELYQSQSGTDQDASLLTLIPYPAAEYWHSILPAGYVNWYKARSVDRIGNVSPWTDYARGMSSTDVNAITDVILDEILDSDAMKELQESAQDSAAKLNEYANSIIQNALANDGDVRIMRKENGKRKAEIKHAEVLIANETEARVQQVNQISAEFNENLNAGLTQVNEALANETEARVTSEEALSARIGENSAALDQKLDSWADVNGVGSMYTMKLGLKYNGQEYNSGMAMQLTASGGSVVSQVMFIADRFAIIRNAESGAYTLPFVVQNDQVFMNNALIQDGSITNAKIGNVIQSNNYVSGSRGWSIDKNGTSELNEVTVRGTIYATDGWFKGTVYAEHIEGDVMIAESNTIPFKTYSDIDSGDYEILKIHGENFDRSIDTNLIIQVNSTFRNTFRVIVQTPGKGEIEFYSIDTGNDGGTRAYALRGFDLPAAGRGQENRIIVRVTQSGRGSNIKTFTPWVERDNGTTGQETSDGVIYNNGFIRERAYISVYRKGNRIVV

SEQ ID NO: 227 - protein, 1256 aa, Klebsiella phage
MTNIKARKGGSSKPRTPVEMPDNLISKDKIKLLLAVSDGEVVNDFSLKQLHFGGVPVQNEDGTFNYEGVIAEFRPGTQTQDYIQGFSESSAEFQVAREVTHNTPYTLTVSNKNLSAIRFRLLWPRVLTQKDNGDMVGSVVEYKIEMAVDGASYQTYLTGKIDGKNTTGGYDRSIRVNLPQNFTSQVLIRVSRVTPDADGVKVVDAFQVQSYAEVIDAKFRYPLTAMLYVEFDSDLFQNQIPTISLKKKWKIIQVPSNYDPINRTYSGTWDGVFKWAWSNNPAWVLYDLIMNQRYGLDQRELGIPVDKWSLYEVAQYCDELVPDNRGGMEPRYLMDVIVQSQVEAFQLVRDICSAFRGMTFYNGESLSIIVDKPRDPVYLFTADNVVDGVFVRTFPSEKTMYTSCNVMFDDEENQYEQDVEPVFNPDAAMRFGHNPTSITAIGCTRRTEANRRGRWILQTNLSATTVSFSTGLEGMIPSCGDVIYVADPHWQSAFNLVLSGRIMEVSGTQVFLAFRCDAKAGDTLILNTDDGKPVRRTIASVSADGKTLTLNVGYNFDVAPDSVFLIESDQLAAEQYVVTRIEKGSDDDEFTFAITATQYDPNKYDAIDNGVITDGRPTSVVDPDSMGAPKDLTISSFSRIVQGMSVETMVIGWSAVQYAKLYEVQWRKDGGNWNNVPRTATTQVDIEGIYAGEYQARVRCIGGGNVASPWSALASASLTGKVGAPKGPINLFASDNEIFGIRVKWAMPEGAEDTAYIELYQSQSGTDQDASLLTLIPYPAAEYWHSILPAGYVNFYKARSVDRIGNVSEWTDYARGMSSTDVNAITDVILDEILDSDAMKELQESTQDSAAKLNDYANSIIQNALANDADVRIMKKENGKRKAEIKHAEVLIANETEARVQQVNQISAEFNENLNAGLTQVNEALANETEARVTSEEALSARIGENSAALDQKLDSWADVNGVGSMYTMKLGLKYNGQEYNSGMAMQLTASGGSVVSQVMFIADRFAIIRNAESGAYTLPFVVQNDQVFMNNALIQDGSITNAKIGNVIQSNNYVSGSRGWSIDKNGTSELNEVTVRGTIYATDGWFKGTVYAEHIEGDVMIAESNTIPFKTYSDIDSGDYEILKIHGENFDRSIDTNLIIQVNSTFRNTFRVIVQTPGKGEIEFYSIDTGNDGGTRAYALRGFDLPAAGRGQENRIIVRVTQSGRGSSIKTFTPWVERDNGTTGQETSDGVIYNTGFIRERAYISAYRKGNRIVV

SEQ ID NO: 228 - protein, 1237 aa, Klebsiella phage; identical to SEQ ID NO: 226

SEQ ID NO: 229 - DNA, 50073 bp, synthetic construct
  source 1..50073: mol_type = other DNA
tgtatgcaccatgcacgcaatttgccgatcgaagctggcaaaacgtcgagttgtgtttcgccaacatttacgtcgtgtgggagtgtgggggcggaatcatcttacctaaaaattgcgcaaaaaatgaccaatataagcccatatatagatagtaagtatatgataaataataatattattattattactctttatctttatatatgtttggtaagatttctccggggaggttatggattcctcttgcgcaagccataatttttagatgttccgccgcgaaaaaatgtatatagggatatataggggatgacagcaaatcttaccaaacacgccgaaaccctttgacggcaaggcctgcggcctgtattatcaccttccgaaacattaccaaacgccgtaaatgtgggggaaacacaaatgcaatacaaaggctatgagttcgaagaagtcgacgtgtccgagtggatgcggtacgacgcagaaaagcaagccgcttaccatgaatggctgcaatccataacgtttggcgacgccaccaggccagccggacggagccaggaagcagcgaagccggaaggcacattcactggtaatcgttcgtccgagatccggcgcatgttcctggatggcgggcggcgtatccagatgacggcggaggagttcgtggagaagttcggcgttaatccggtcgacaaccatttccgcaggccgttgctgaaactcctggagccgggcgaggtgttgcgggtgagcctgggggcggggttaatctccgtctttaccgagttcgacgcaatgactggctcacacctggaagccgaggcatacaggcggcagggcgctatctctgagcgggaaagaatacttgccatcattgacgaagtgatgccaggaggcatcatgctaaaaggctataagctggcactaatcgcaaaaatcacaggagcacgataatgaaactatatccagaccaaaacgacccggcggcaccgatgcacctgggcgacacgccaatcgacgagcaggaggttatcgcagccattgccagggcatcggacgacgaaaatccaaccgccatggaatgcgtgacagccgacctgctgttaatgtcatttcttccgggatctgaatcttacattcagcacatcaccgagacgggccaggcagtgacgaagccggaattcatcggagcgtctaacgtcctggcgatgatggccgatgaggccgacaacatcattagcctggattatccacaatgagcgcctttatcctgttttccatcggtgttaattgcggattgctcctggcggcatttatcatccacctgagcaacaagtagcactttttgttaaaacccggtcagagcgatcgggtattatctcttcatcgacaacgaaccgaggaaagcgaaatgattactctgatcacctgggaacacgaaaacagcaagccagaagtgcgcgagttcgagaccgtggcggcgtgctacaacttggcggcaaacggtggcttttacaaggcgcagatcgttaacgagttcggggttgttgattatgaattttaaggcgagcgacgtaaaacctggtgtagtctacggatcgcgcctcaataaccgcctttggcgctgggacggcgaaactatgtggactaaaggcgagggcgatgttatatggcatgaatgcggctggcctcatcccacaatgagccgcctggatatcgcttattatctttcggtcggcgatatgcacgaggtcgaagatagcactttttgttaaaacgccgcccgcgagatccggtattatttattcatcgacaacaaagaggagatgaaaatgagcaagaagaatccatattcaaccagcaactaccataacgaacacgtcatgcgctggcactggcagaaactcaaagagcgctaccttgcacgccagggcaaataatcacaatagcgccgcttcggtggcgctgcatccccaccaccagcacggcaaacgccatgaggaatggccatgccacgattttcagcaacaaccaaacttcgcaccttcgccgggatgccgatcccacactcatcaaccaaagccgtccagggcagcgagcacggcgtatacttccactggcagggcaagtggcgtttcaccgtcattcgcggcttttacgtgacctgcgatcgcgtggatatcgagaaccattccggcgggaacaaggttcacgagttcaaaaagcacgaatagcactttttgctaaaactcgatcgggtcaatgcggtattattaccccatcaaaacagaggagcaaaaacatgattggcaaccacaacaacgaactgaacgcagcagaccaccgtcgcgccgtcgagcagaacttcaactcgcttaaagtagcctgcaatgagatgaaagcactgcttgaactgccgtcatgggatccacaactcgaagactactatgacggcctccgcgccaaacgtgacggtatcatcaaccgcctgcgcctggccgggatgttcctgtaaggagaacgcaatgattcacgaaattaagtctggcaagcaagtagtggcgaccataacgcagcgccacgttgtagccttccagattaacatccctggcaccttcgatatgcagtcgcttgacgtgccagtttgggccaacacagttgccattgatgccgacggctcgatttgggcctacgagtcgaccgccgaagatgtttgcatcccggactactcgcgcaaatcctgggttgattgcgggccttccgaaaacaagatgaggtcaattggggagatggattgcttccctgattgggagaaatcgaagattgacattcgcggtctgaaatagcacgcattgctaaacgcccagtcagaggaacgggcataatagccacataccaaacaacggagatttaccatgaagcagatcgtcaaaaacgcagttgtcgccatagtcggaaccaacttcgaaggcaagaaaagccgcattcaccttttgcacgttggcaatgatggcaaaattcgcggagctttccattacggcgagcgcggggagcaccttcacagtgacttgcattccgttatccagctaaccactttcaacgaatggcgaacccatcgggaatggctgccggaataccattacgagggtttgattgtcgaatagttcgttgccgacccaacgaaacttaccgcccgcgactataagcgcatggcacgcaaggcgcacaaactaatgaaacgcacgccagaagatcacgtctggcatgttttcgcaaatcagctttgaggtggctggatgatacgtttatcagacttcgatcgccactgcttaacagggcaattcggcgaaaagccagtaatgtgcaagatctcgaaggttaagggcgagccgtttgagcaaatcagaacgcttataagttttgccagacgaaaccgcctttacatccaggcacgcggcggactgttcgcaaagcaggttcattttgcgtatggaacagggttctacactggcggagacggtgttgacctatcgcctaaaagggttaggctgcgtgagataatcgaacgcggctacgtttggactaacgggatctactaatggaaacggtaaaagtaatttgcacgcacgctggctattcgccgctatcaacctatttcacacctggccgcgagtatgacgccaggttcggccctggccttgatgaagtgtggattttgcaggacgaccagggaaccactgaggacgaagaattttggcccgcctgccgtatgccggacgaaaagatcgccatgtacgccaataggccatacgaaaacaacgttttgtttgaggtgaaagtatgaaagtaagcaaaaagaaactcgcgctgtattgggccttcttcctggctggcctggccctgcatgacagcgtgggctggcagactatcggaatgctgtgcatgattattggcgtatgccgcctgtcggagattaacggattccgccggggatatcgggcagcattcagcggcgaaaaagaatagcactttttgttaaaactgccgtaacgtcatttgataaagtggcgttactgaagtgaacaatccaatcaggagcaacgcaatgaacgataatttaatcgcactgctggaagaactgaattcctacggctgcgcatacatcgagctttcgagcgagcaggttattgaagtcgcaatcgacgatgacgccgggtttaccagattaagggtggcggcaggggccgaagaggaattcgaagactgcggcatccgtgaagtaacaaaccttctcgaataccaccaggtgaaggagatccgctaatgaacaccgtcaaacttatggttgtcaatgcggcccgcgagcgtgagcgccaccttatcggctgcgtattcgatgccgtcgaggtgcacgaaccgctaggcacagtgcacgtaatccagggcggatacctgaacgaattcatcgtcaacccgctggacaccgacgaagatttgaccatccgtgttggtagcgagccggaaaacgcgcttttccacctgcggaaagtatcgaaggcgtcgcagcgcaagttgctggttcgcgcactgaagcgcattgcgaaggagcgcggttacaccgacgcatacatccgcaagttcggcacgttcgctggcgtaggcgattgggcgcggtcatgggccgacttttatttcaacaaatccggcgaattctgttccgtgcatacggactggctgcatggcacagaacacgatcccgtaaacggccacgagtggtacgaattcattgaggcggaattagacgccctttgatagcacgaattgctaaaacgaaagtccggggatggtgcatactatccccacactaacgaacaaaggaaattacccatgaacagcatgaaaattaacctgatcccgtccgacaacttcaccaaagacgacgacccgctgttagccgccgttattcgcgccgggatcggctgggcgcttagtgatgcctcgtgcgaatcatttatgcgtgaaccgttctcacgaatcgcggagcttgaaaagcaggttgctttcctgactggtgaacttcaggcggctatcgccacgatcgagaaggttcgggaaatcatgcgcaccgaacctggctatgacgttgaagatcacgcgcgagttttgcgcatgatggccgacgctttcgcaaagctccagcaatagcacgaaccacaaacacgaatcgtggttgctacatgtcaaccccatcaaagataaggaaaaacatcatgatttacgcaattattgccctggtggttcttattatggccctgtatgcgtgcggctgcttcctcatgcgggccttcctgaaatctgcggattctaccgacaaagaagatctttatcctgtgctttgctggccctggattacactttccgccgttggcagcgtgatcatttcccgcaattttaagtggtgaggcgatacatgaacatcaaaatgtggttcaacggatttacctacaacgtgcgctttcgcgggaagttctattactggtgtgatgagggcggcaagcgctggcggattcgcccacaccagaaaggcgcgagttatgagttaggcattgccgaggcgcaggggcgcgtcgagtgggttaagctgaaagtcatggatggcctgccaaatagcacgaattgctaaaaccgatcaggggtaagctggtatagttaccccatcgaaacgaaacggagttacagcaatgaaaatcaaaataaccaaaatcaacactcttaatggcgacggctcaattaccctggaagaatgcggcctcaaaatcggcgaagttcttgaggtcgacggccacttcaacgacggctcctactgtgtgattgctccgcgcaatagcgagtttatccaggctggtgacaatatcagcgtgagcgaagatgaatgcgaggttgtggaagaatgagcaacaaaatttgggttctaacctacaccattggaaccaacgaggggcgcaaatcgcgccgcctcatctgcgacaccaaagagcgggcgattaggcagcaaaccgttcttggtggcgaggttgtcgagtatctccgcaagcctgaagcgttcaaggtgaactggccggaaggcatggatatcaacggcgctttagcgagcctgcgtgagatgcagcacaacccgaagacgtggagcgaccttcaatgcctgcgggcagagccggaagtgaaggccgacccgttcaccaatattcgggcgcagcacgcggaatggtcggatcgccagttcggtaacgttgggccagttgggccgctcaagcacctggcgaaagaggcgatcgaggccgccgaagcgccggatgacattagcgagttcgccgatatcatcatgttggtatgggacgcaacgcgccgcgccggattcagtgatgagcagttggctgaagcggtggcggaaaagctggaacggaacaagcgtcgggcgtggggcgaggtcaaagatggcgagccttgccaccacgtgaaaaattaacgaaatcgaataccgtttaaagcgcctgtaagccattctggcgggcgcaaatttaaggagtgcgattgtatgcctgaatactcaaaagtcgaagatatgccgattggcgcaacgattacgggtatccgtatgagtgagtcggtcgacacaatcgagccgctggcgttcccggttacgcaggtggagacggacagcagaaaagggttcatcttcatctacaaaaatttcaatagtccgctgcgtgttgaagtgttcattgctcgcggaacctgggtagaatgggagaaggacaaatgttcggactgaatgaagcgcagtacaacgctgtgaagcgcatagcaaagcagatggccgcagaaacaaaagacgccatcaagaaggacaagaagacctacgatcaggtcgccgcgaagatgatcgataaacattgggcgcaaatcaacacgctggttactcgcggccagtttatctggatagctggctacctggaaggccgattcggtcgcagggatggcgagtatgaataaaaaacaggcaaacgaatcagcgacctattgacgtcctcgcgctgaccgggtaacttgaaccacgtagacacaagaggcggtaaacatccgcaagtctggccccgctttggggcatttacaaaaggggttgtgatgcagtacaagatcatgctcacagcaagaaaaatgggcggcttttgcaagtcctgcattcaagagtttagcatgacgattgaggcgaacgacaccgccgacgcggtggagaaagcaaaaaagcaatccggcgttaatctggatacgcataaaatcaacataaactacataagggaagtcaatcaatgttaactctgattattgcactgttaatgctgttcataggctatcatgttggcgcggctcatcttgtcgagcgcctttctaagcgggtacatgaaggcacgtttgctgccatgatgtacaataagaaaactgcacgttgggaaaaaattggcgatccggatggtatcgcaaagcgcataacgttttcgccgcttccgtatgttgactgcgagcctttcgtgaaactacagaagacgcttaatcggcgaaacaaactgatatgatacaacgacccgcttcggcgggtttttttatgcctgcaatctggtatactcgcaactcaacaaagaaggagggctaaaaatgtctgaagaacgtagaaagcgcgtaacgaaatcgcactttgagggaaacttcaaagcgctatatgaaaaggaatttggcgtcgtgctggggcgcacggcagaaatgacgccagaacaattttttgatatcgcaaagcgttacttccagtgggccgaagagaacgcaatcaaggcggcggaaacggcaacattccagggcgacgttaacgagtggggagtgaacaagcctcgcattttcacgatcacagggttaagcctgttttgcggcgtgaaccagtcaacgcttgggcgctatcgccacgacccgaactatgcgccagttatggagtttatcgactccgtaatctatgagcaaaaattccagcttgctgccgtcggcatgattaacgcttctttcgtcggtaaagagatggggatcgataagccgccagtgctgaacatcgacgctatcgccggggataagaacgagatcaccgaagagaaattagagaaagccgtgaccaatattcttgataagctgtaagggtaggctatgaacgaaatgatcatttgggaagacctgtcgccagccgataagctggcaattaaggcactgagtacgcgaaacttttcgctattcctgaaaatctggttccagatcattcagggcgaaaagctaatgtggaactggcatcactcctacttttgccacacggttgatgaaattatcgccgggaagcgcaagagcacgatcgttaacgttgcgccaggctccacaaagacggaggtgttttcaatccacctcgcgccgtatgcgtatctcaagtgccggaaggttcgaaaccttcagatctcgcagggtgacgccctgtcaaaaggcaactcggatcgcgtgattaagatcttctcatcaagcgagtggcaggagctatggccatcaaagttcgggcgcaagcagatcgatgaatttcaggtcatggacgataacgaccgcgtaaggcttgaaatggtctcccgttcgtccggcggccaaatcgtcggtaagcgtggcgggtacatgacgccgggattcagcggccttatcgcgctggatgatatcgacaaacccgatgacatgttctcgaaggtgaagcgtgagaaaaaccacgtactactgaaaaacaccattcgatcccgtcgagcgaagaagaagaagggcgacgaaacgccaatcctttccgtgcagcagcgattgcacgcgcaggatgccacctggttcatgatgagcggagggatggccatcgacttcgatcgcattgttattccggcgatggttacgcgggaatatggcgaatcgcttcctgactggttgcgtcctgagttcgaacgcgacgtgctttccggcccgtcggtggttattgacggcgtagaatactggtcattttgggaggacaacgaatcgatcgagaaccttgttgccttgcgcgaggccgatctttatacgttcctttcgcagtatcagcaggagccaatcgccctgggtggcaacgtgttcaagtcggagtggtggcgctattacggcgattccgacaaggcgcacgagccacgcccggacaagttcgaatatacgttcatcacggcggacaccgcgcagaaggtcaaggagctaaacgactactctgtaatgtgctattggggcaagtatcgggatcgcgtctacttcattgacggaattcgcggcaagtgggaagcgccagatctccgcgttcaggccgaagcattcatcaagcagtgctggcgtcggaacaaggagtgtgggaaccttcgccggatctacatcgaagacaaggcgagcggtacaggtctaatccaggatttaacaaaggcggtaaacggcatgggcgagatcgtcccggtgcagcgcgataaagataaggtcactcgcgctatggatgcacaaccaatcatcaagggggggcgtgtcgtgctgccggacaatcacccattcgttgcagagcttgaggcggagatgagcgcgtttacatatgacgattctcatccacacgatgatatttgcgacaacgtgtttgacgccgcaaacctggaaatgaacctgagcgacgatccggtagagcgaatgaaacgccttgcgggattgaaaaagctgggtcgctaatacataatgtgggcctgacggcccacacttaaacaaggttgaaatatgaataacattaagatggacgactataatcaaatctttaatggtggcgctggttatgcgtcaaccctcgcgtctatcgcggcaagatttggaacaatgtcgcaggttgaagagttctatcatgaaaacggcatggcgaagaaaatcgttgacgtgatcccggaagagatggtggctcccggcttccagctaaacggcatttcagataacaccaagtttcaatcagaatgggacgggttaaatctggagccgcaaatcaccgatgccctttgctgggcgcggctgtatggtggctcctacgtcctggcgatggttaacgatggtcgcgcattgacttcagcagcgaagcggggtaagccgctcgaatcgatcgttgtttacgaccacgattccgtttccgtcgcagaggaggaaaccagcccgcgaagcccacgattcggaaagcctaaaatgtacgaggtgaagccgctaaacggcgggcaaccgttcaaggtgcactatacccgtatgcactacatcgacggcgagcgagtaaccaacaaggtgcgcaagctaaataatggcgctggcggttcggtgctgaacaagtcaatcattgaagctattcttgactacgactattcggaatatctggcaacgcagctactgaagcgcaagcagcagggcgtttggaaggcgaaaggcctggcgctaatctgcgacgacaaagaaggcgagtacgccgcccgtttgcgcatggcgcaggttgacgctaattcaggcgtcggcaacacgatcggcattgatgctgacgacgaagaatacaccgtgattaactctgatatttcaggcatcccggaattcttgtccgctaaaatggatcggattgtcgccctgtcaggcattcacgagatcgtgctaaaaaacaaaaacactggtggcgtaagcgcaagccagaacacggcgctacagacgttctacaaactggttgaccgcaagcgcaatgacgattacaagccgctgttagaattcctgttacagttcatcgtaacggaggaggaatacagcgtcgagttcgaaccgttgtcgctgcctaccgatgcggagaaagcggatatcttccagaagaacgccaacgcggctcgcggcctcgttaccgaccaggttattgacgccaacgaagcgcgtgatactctgtcggcgttaattcctgaactgaagctaaaaggcaacgctccgaagcagaaaaaacttccggatcgcgccgctggttcaggcagcacgcaaagcgcagagatcttaaacaacacggaggcggatgatgaaagttaacggcagaatcccaaactggcgttatcctgaagcaagcgagcgggatttatcccgctccatgcaggacgcggtgacagaactcgtggtagaaatgcgggatcgcttagaccgcctgaaatttgacgccacggcggaggagatcagccaggcagaagacgatatcagcgaatcggccatcgtgttcttttccgccgtaattgcggcgctttcctccattgggttgactatctatagattcaattctaaacagtggcttgcaattgcgattgcggctggcgggcggaacaacgaatcagttatgcgccttaaagaattcggcgctggcgggtatgaagactggtatcaagattcgttgaggaagtgggaagataccgccgaagcgtcgatcaggaagttagcaagcgatatcgttgctgactggacgacgaaagttagaaccgccaacaacattggcaagtctcgccagcagatcgatgaaatcatcgaagggcgctacgcgatttatggtagctggtcgcgcaaccgggcaagcggaatcatcggaacttttaacagtatgttgatgatgcagcgcctaaaagatgctaaagtgtcgcattacttttggttcggcatgatggatgaccgcgagcgcgaaagccatatcaagctagaaggtaagcgacgccctgttaatggtgatggcattttccccggcgaggagtacggttgccgttgctgggcggttccgtcatttgataatgaggatgattgatggttaactttaatgattactttaatcacgtaggaaaggatctgatatggaagcgagcaacatcaaaccgagtaaaagttggtgatgttgccgggtggaaagatgagcatgggtatgtatacattagattcatgggcaaactgcgacaagctcaccggatcatttgggaaatgcaccacggcacaatacccgaaggaatggaaatcgatcatattaaccatgtaacggacgataacaggatcgagaatttaaggcttgtaaccagaaaggaaaactgtaaaaacgtatcaatgagcgtaacaaacaagagtggagttgtcggcgtgagttggtgcaagagaacaggtaaatggtttgcatccataagggttgataaaaaagagcgattcttaggtagatacgaagacaaaaacgaagccatttcagcaagagaggcggcagaggtaaaatacaatttccataaaaatcacggagataaaaaatgaaaagagttcaaaggttcgacacggtaaagatgaaggcccgatttgatgagaatggctttctggttgacactccgattgtggcgcgtatcggtgcgcaaacgtaccagacgccaaccgggccgcgagtcgagttccgcccgcgttctgaggtgtttgatgctgaatcgctggcttcataccagggaaagccgatcactttgggtcacaagatggttaacgcgcagaatgcgaaaggcctggttgttggctcgtgttccggcgctggcaaagaagaagggatcggggttctcgttccggtaatgatttacgacggcgaggcaatcgagcaagcgaagaagcgcgttgccgctgaattgtcggttggttacacttcggcagatatcgatcgtaagggttggggaaacaacgccactggcgaatatcacttcgatgatgaactaccggaaaacttcgaagagatgaaaaatgattccgtctctgattgggttcgctttgatgcggtgcaaacgaagattcgcgtgaatcacgtcgcgcttgttttccgtgggcgagcagggattgcgaaattaaatcttgatagcgaacaagaattcccctatgatgacgactcaaaccacaaaggagctaaaacaatgatcattaaaattgacggcgtagatgttgaagtggccgataacgtaggcgcttacattgccaaactagacgcgcaagttgcatcggcaaccagtcaggtaacgagcatcaccgcagagcgcgacgcacttcaaaccaaagttgatggcattgaagatgaagttgccgcccgcgttgctaaaatcaaagccgacgaagacgcaaaacagaaagttatcgcagttgtttctgccgctggcgtcaagtgtgacggcctggatgttaaggcaatgaaagttgcttacatcaaagaggtagacggtcgtgatctgtctgacaaagaagattcgtacatcgacgcttcttttgactttatcgccaactctgataagatggctggcaatcgctccaaagtcttcggcaaaaaagaagatggcgagcaaaaagacaaaggcggcttaccgaaacttgacggcaccgaaatcatcgatccgcaggcaaaattccgccgctaataatttgcggccttcgggccgctaccagaccaaataaacaggagattcaaaatggcacagattccagcttcttattcccgcaagcgtgatattgctgtagcggggcagatcgctgatacgtcactttacaatatcgacggaacttgtgttgctgaaggcgatatcaaagctggcgtactggtggcttccactggcgcagtttccaatggccacaaggtagttaaaccagcaaccgcagcgagcgacgtcattgtaggcatctcgcagttctcgcaagcctactcgcctgaaggcaagtatgacgatgagagcgcagttaacgttatgactcatggccgcatttgggcgatcgctgacgcaactgttactgaagaagattgcgcgttcggttctttcgtcacctttaccgcaaacggcacagtagcgaagggtgatgccggggttatcaaaactggctacaaacacactggcgaatacaccaaaaacgcagatggcactgttctggtgaaagtgcaggtgctttagggcgctgtagctccagcggctacaactggcgacgctggcgtataaaataaggggcttcggccccatttttgcaccagaaaaaaacctttgacggcttaacgattcgtgatattcttcatctcgttaagctaaatacacaaacaggagttttcagatgactatgaaattagatgcattcgaacagagtgccattaaggtcgcaatgcagggcatgggcattgatgccgcaaaactggatgcttacggtatctggactgttaagcagatgactcaattactgaatcgccagtatgagcaggcatacccgcagaccagcgcacttgagcttttcccggtaactaccgagatctcgccgaccgcccgccgctttgagtggctcgaattcgatggcgtaacttctgcgaaaattatcgccgattacaccgacgacctgccgaccgttgaagcgatggcgaaagagaagtcagggaaagttttccgcctgggtaacgcgtggtttatttccatcgacgaaattaaaactggcgcggcgctgggttccagcctgagcgatcgcaaggcaactctggcccgcgaaggtcatgagacgctcgttaatgatctggtgttcaaaggatccgctcctcacggcatcgttagcgttttcgaccatccgaacattaaccgcatgaccgccagcgcggcttggggcgatgacgcagcagcggctgaaaaggcattcgaagatctggaagacctgctaaacatgatcgaagaaactacgctgggccgccatcacgcgaccaacatcgtgattcctccgtctaagcgtcgtcttctgacgaaaaagatgcctgacactagcggcgactcttatctgacctggttcaccaagaaccacccgaacatcaccattacggcgatggcggagctggaagatattgacggcgcaggcaccaaaggcgtgctggcatacgaaaaagacccaatgaacatgagcatcgagatccctgagcggttcaacatgctgccgatgcagccgaaagacctgcatttcaaagttccgtgcacctccaaatgcactggtctcatcgtgtaccgcccgctgactattgcgattctcaccgggatttaatcaaaagcgccttcgggcgcttttttattgcattgcattctgcaatgtgctttaatttgaaacctaaagtaaaccaatggagcattaacaatggccagtaaaaaagaaaccgtagaaaccgtagaaaccgtcgaaaccgtagaaaccaccagtgccgaacaggcgtcgcaggttgttcaactacaaaacgttggtgcatgtgcaattcgctataaaggcaaaaattacgtctatgagcaggtttttgaagtgccggaaaacgaaatcgaccgattccgccacgaaatcttcaaaggccgggtcgaattctacgacaatccgaaacgcacgcgcgaatacatcgcagcggtgaaggcgaaagcgaaagagatcgtgcagcctaaaagcgcggaataacaaaaactaacaaagggcgcttcggcgtcctttttcatatcaggagagcgaccatgaattacacaattcaagatgtgatcgataaaatgcgcagccttgcacctccgcttaaagaagttccagatgaactgctgtctgcgtgggttgtgcttgccgaagagttcgtttgcaaatccaggttcggggattccatcgttacggcgatcgcattgatgaccatgcacctaatgtttttggatggagcgatgaagcaggaaggcgaaagcctggaatcttacacgcagcgagtggcatcgttcaccctgaccggggagttttcccaaaccttcgatcgcgtatcggcgtcaagcgacaacgaaatgctttctacgccgtggggcaaaatgtactggcgtatgctcaaaatgcgaggcggtggcttcggcctccttaccgccgggaacgtgcgccgctgcggaattggtaggtgatcgctatgaactacaaacaaatccaggcacgcgcaagcgcgggcattaagtttttcagtgacgctgacggcgtattcaacaagtacacgaaaggcgctggcggcggaatcgatccggaaaccggggaagatatcattcctggcgaggtggtaacgacaatcaagggcgcgatcagggatgtaaattaccgtgacattaacggcgaaaccatcctcgctggcgataagcgcgggtttttcactcatgatgtgccaatcatggagggtgacgaaatcgaagtagacggcgagcgctaccgcgtggttaatgcccgtccggtaaaaccaacgggaaccgttgttgcttaccgtccagttttgcgcagggtggcgacttatggctaattacacgatccgggagttcacaggggcaattgatgcatggtgtaaggccgctggtgatgcgctggaggacgttgtaaggtttacgtgtgaagatattcaccgcgacctcgtaatgcgttctccggtggatacagggcgcttccgtggtaactggcaaatcacctttaaccgcgccccgctttacgcgattaacgcatatgaccaaactggcgaaaagacaatccagaacggcaaagccaacattgcactatacgcaaaaggggctgggatcacttcgatctggttcagtaacatgctaatctatgcgaacgcgctggaatacggccattcaaagcaggctcccaatggtgttatgggagttgttgcgatccggttgggcgtttatgttactgaggcaatcaagcgagcgagggcgaaaaatgcattatgagatggcgttaaaatgcaaggcggcagtggctaaatttgccgccgagaacgggttaatggtcgcaggagataacgttgactttaagccaccaaaacacggtgaaacttatctcaagttctcctacgtagaagcggattccagatctgtcagcctttccagaacttgccgcgtttatctggctatggtgcagattgacgttgttttcaaacccgggatcggaaccgacgccgcgcggctaatcgcgcaaaacgttgcaaaatccttccccgaaggcaaggttgttgattctgaaagtaagttatatgtgagcgagtgggcggaagtgtaccgcgttcagaaacacgaaacaggctggctcctacccgttcgcttcacagtaagatgcgaaagcgcggaggagagcggttatccatcaacatgactggtcttagaggtgcttataatttcttgccagcctgtaaatatataggcataatggcgttgttaaactttcatcaaaacaggagtattcaacatgcatttaccaaacggtgcaaaggtcttctttgagaaggctcgcggtgcggccattccgtttaccgcaatgaccaacgacgcgaaaaacccaaaaatcacagtggcggacggcaagctgaaggtgaaagatattgtgatcttcaccgattgcacctggggcgacttcgttaacaaggtggctcgcgtaaaagcagtgacagcaggtgtggcaacgctggaagagttcgatacctccgacactaacaagtatccgggcggcgcggccactggtaacgtgagcgtgatcactgattgggtcgaattgccttgcattcaggatttaggcaaagacggcaacgaacagcagttctataactatcagtgccttggcgatgagcgcgagcaatcagaacctacttacaagtcggcggtgacgcttaactacacgtttgcgcacgattacagtaacgcgatctaccctgtgttgcgttcagccgacgccagcaagcaggcgagagcgatgtacatgtatatcccgcgagcttccgaggttcgttactggtctggaattgcatctttcgatgacattccttccacggctgttaacgagatggaaacggtaacgcttaacattgcgcttaaaggtgctcacgtcttccttccggttgtcgtgtaattaaatggcggggcttgtgcctcgcctttttttgtgcataatagcgaataacacaaaccaatcaggagttaacaaaatggctaaattcaaaattcaaattggcggcaacctcccttctttcaaactgcccgtaaccttcacttgcccggatggcaaagaagcgaccatcaccatgaccgtaaaacatcgctccaccgatgagatgaaagacttttatgagagcgaagataaagcgccaaagggtaacgccgagtttatccgctttatggccgaaggctgggatcttgatgatgagttcaacgacgaaaacatttcctggctttgcgctcacttcccggcgttcgtcatggcactgccacaaacttacatggccgcgcttgcgggccaccgtgcaaaagtttaaggcgggctgtttatctcacgcttcagcctgagctaaccgatcgccagcttgccgagtacgggttaaggcgatcggattatgaggcagatcttgaaacgatctactttgatgaacagaccgcccaaagctggcagctattccaggccatgcaaacgcagtggcgcattgggatgaacggcccaacggggcttgactataatacattgcctatgttcttcgaattgtataaaatcgacaatcgagaagcggcattacttgacttgcaaatccttgagggtgaatatctgaaggagatttacaagaaatcaaaataagcgcctacgggcgcttttttcatatgggggctaaacatggctgataaagtagctgggttgacgtttggcgttgacgtttcgcaggttgataaagcggtacgatcactagcagaactgaaaaaccaaagccagcaaacaggcgctggcctacagtcacttgcggacgctgaaaggcgggccacggcgcagaccgaggaaatgaaccgcgcgttgcagcgccagaagcaagagactgacaaatcaaaaaccagctttagcaggatcgcaagcgccatcgatccaacgatcgcaaaaatggccaacttgcgcaaagcgacggaagaacttgataaagcgtgggcgctgggtcttgttccggacaaggaatttttccgccttggcgctatcatcgagtctaccaccaaccaactccggcggcagcaggcggcgctaaccgaagaaggtcgcgcagcaatcgcagaggcggaggcaaagcagaaggcggcaaacgccgggcgtgattttgtcgccagtctgaaacagcaggctgactccatcgggaaaacacgcgccgaactgctggaaatgaaggcggcgcaattgggtgtatctgcggaagcggccccgttcattaatgccctgaagcagcaagagcaggcgttaaagaaacagcagaatgcgatgggcctggctggcatttctgccgggcaatataaaatggccatgcgccagttaccgatgcagatcacggatattgtaacttcccttgcgtcaggtatgccaatctggctggttgcggtgcagcagggcgggcaaatcaaggacagcttcggcggcttgagcaatacgtttaaggtattgttgagctacattaacccgctaacggttggtgctgcgtcgttgggtatcgccctggcggcaatcgctaaagctggttatgactcctggaaagcgcaacgagaactggcgaatgcgctggtgctgactggtggctatgctgcgaccaccaccgggcagatcacagccttaaccgaagagattaacaaaaactcatcggctacgattggcagcattcaggaaatcgcaacatcgctcgccagttctggtaagtacacaatcaaccagattaagcagatcacgaagactacggcggaatggtcggcgcagacgggtgagagcgagaagacgatcacagggtattttgattcgatcgcaaaagaccctgttaaggggcttgccgatctcaatgagcagtttaatttcctgaaagagggccagctaacctacatcgaatctttgcgtaaaaccaaaggcgagacggcagcagcagaggcggctacaaaactgtttgctgatactatggataagcgccttaaagatatcgcggacagcgcaacgccactcgaaacgatgtggacggatatcaaaaaatgggccgctgactcatggaaatgggtaggcgatcacacggtaggggcgctaaaccttatcgttgatacggtttccgcgatcattaacacgatcaggaagctgattgccgacggcgacgccatgatcgcgcagttcatcgttgacgctggccggaagctgcaaaaaattccaggaatgggcgactttggcaatgaatttctggcgcagcaggagcagctaatcaaggactcgaaagcgaaatccgacacgcttgcaaaaaccattgcggaacagcaggcaaggatcgcaaaaggcgaaatgggttacattgatgccgcgaaggataaaaccctttccggtgggtacagcagcaaaacgaaggatcgcgtaaatcaggaagaaaaagatatcctgaaaaaccgcaacgccaggaagcagcaggtagacgcgggcgttaaaattgatgagcagtatcaggctgaactgctatcgctacaggcgcagctaaaggttttgcagcagcacaaagggcttgacgacaagatcagccagcagcgcaaagactacttcgagacggttgctaaattccaggttttggaagaggcaagccagaagcgaaaactgacccaaagcgaacagcagatgctggcgaacaaaaagaatatcctgtacatggcggaacaaaaggccattgtgggagatcagattgttcagcagcagcgactgaacgccttgcttgacaagtctaccaagtatcaaaaccagatggcggagaagaccaaggcgctacaggataccgccggaatgggtagcaaggagcaggagagataccgggccaatgcgcagatggcggctgactggaaaaacaacggcggatctttaagtgaccctggatttaaagcgatgcaggccgcaagcgataaattctacgcacagcaagatgcgcaaatgatgaactggaaggccgggtttactaacgcgtgggctgacattggcgaagaagttaatgacgtatacaccaatatcggggatatcactaaaaacgcatttaacggcatggcgagcgtgctgactgattttgtcatgactggtaaggccagctttagcgacttcgcaaagagcgtgatcactgacattaccaacatgcttatcaagatggcgctgtttaactcgctttctgccgcgtttggtggtggtggaacgttcagcttcgccagcatgttcagcaaaggcttttctggcggcggttacactggcgacggcgggaagtatgagccaaaaggcgttgttcacggcggggaattcgtattcaccaaagaggcgacgcaaaggttaggcccggaaaacctgtaccgactaatgcgcggctatgcaagtggcggcctggttggtggtaacgcaagttccggatctggaatcaccaacggcggcaacgtcgcggcgtcggcggctatggtgtttaccattggtgatattaacatcacgatgggttccggtcaggatagcaaggggctagagcagggcgtaaggcagatcgtgaacgatatgttcaccgaggctttgagccaaaacgggcgcattgcgaagttcgtcaatgagaaaacgaggaggtagtagtggattcctttaaatggtgtacacaaatccaaggaggggcggcgaaagtcgccgtatccaataacgttcgggcgatcagcttcggaaatggctacatccaaactgcgtcgagcggcattaacacaaagcgccggactgttccgatcgtttatggcggttcggattgggaagcggtttataacttctgtcaggatcacgtaacaaagccttttgtgtggaaggcaccggatggaagaatgggcgtgttcgtcgtaactgccgactccgttaaccttgcgccgcagggtggcggggtgtttgaggtaacggctgaattcgccgaacgcttcacttcagccggataatcaaaaagcgccctttacgggtgcttttttttggcctatgatctggagtcaattagaggagggcttacgatgacagccaatgtttcaaaagattttgcgaactgcctacaaaaacttttccccggcgagatcctaacgctgatcgatatcgacgccacaaagttcggcgggcaggtctaccgattccataacgagaacgtcgcctatacaaccgaggagcttttggccgcggttaacggcgggacgcttcagccaaagatgatcacgtttcgcggcgagcagtacggcccgcgaccgttcggcctgggcgggatcgcaatgtcgagcgatggcacagtggaaaagccaacgctgacggttagcaatattgatgcgcaagcgagtgctcttattcgagcctataacggccttatgcaagccaaagttacggtatgggttttggtcaaggaattgctacaaaacgacggcagcgttaaagagggcgattttaggcgatttatttactacatcgagcgcccaaaacaggtcgacccgcaaaaggcaacgttcgaattaacatccgtgtttgatatggatggattaatgatcccggcccgtctgacgcaaaccgtttgctattgggcgcagcgtgggtggtacaagtctggcaaaggctgcgactacaacgggcagaacggatacttcgacaagttgggaaacagggttgaagacccgtcgcaagatgtttgtggcggcttggtttcttcttgcaggcttcgttttggcaatgaaccgttgagttttggcggttgtgcgacagcaacattgaaaagtggaaggtaatatgttaactccgaaaatcaaaatgcagatcatgcagcacgcgaaagaagtttacccgcatgagtgcgcaggtctggtgacgcaaaaatcacgagtgcaaaaatatcaccgactcgacaacgtttcgccagatcctgagaaagaatcaatgcctgatgaaacgcagtatgcgctggcatcaatggagggcgagccgatcgccttcgttcactcccacactggcgatggggcaaccacaattccgagcgccactgatttatgcttttgcgatgagtctggcttgtcgtgggttatcgtctccatcccggaaggtgatatgcgaatcattgagccgaaacgccgacctctgattggtcgcccctgggctttgggcgcttacgattgctatggcctaatcatggattttcacaagcgccacggcgtcacactaaaagatcggcgattgccgttcgaatggtggaagccggaatacaaagagaatctttaccaggattactggcaagaggacggattcattgaaaacactggcgagcctgaagttggcgatatgatcatcttccagattcaggcggaaaagtggaatcacgctggtatttacgttggaaacaataacatccttcatcacgcgtttggcaagctgtctcgcagggatatctattctggatggtacgagcagcacaaggttttaatttgcaggcacaaggagcttaaacatggcatcacatacaaagacgattaaactatccggttccctggggcgtcggttcggtgtcttccacaaacttgcggttgattcagtcgctgaatgcatccgggcgctgtcttaccaggttgaggggtttaagcctttcatgcagagcaaggttggtttaaatatgcgcttcggcgttgtcgccgacggaaaaccaatcagcgcgaacgaccttgcgacttttgccgtggcgagggagatcagaatcattccgatcccaaaagccagaaagaacggcgggttgttgcaggtcgttatcggagcggcgattatggttgcggccttctttactggcggcggctcgctggcggctatgggcgctttttcatcggctgcattcatggctggcggctcaatggttttgggtggcgtaatgcagatgatcgcaccgcagatgggcggcaatatgcgggcgagcgaatcgcctgagaataagccatcgtatgcgttcggcgggccgattaacaccacggcggcaggttatccaatccagttgccatacggttacagattggctggcggcgcattgttcggttctggatcttacgcagaagacaacaactaattaagccattcgctttttagcctgggggcgtagcctccgggctttttgtcgtgtacaattgcgagactattaacaggaggctaaacgatgactaatatcaaggcccgtaagggaggctcaagcaagccgcgtaccccggtagaaatgccagataacctgatctcaaaagacaagatcaagttattgctggctgtttctgatggcgaggtcgttaacgacttcagtttgaagcagttgcatttcggcggcgtcccggttcaaaacgaagatggaagttacaactatgaaggcgtgattgctgagtttcgccccggcacgcaaacacaggactacatccagggcttcagcgaatcaagtgctgagttccaggttgctcgtgaagtcactcacaacacgccttatacgcttaccgtatcgaacaaaaatctgtctgctattcgctttcgcctgttatggccgcgcgtgctgactcaaaaagataacggcgatatggtcggatcggttgttgagtacaagatcgagatggcggtagatggcgcaagttatcagacctacctaactggcaaaattgacggaaagaacacgactggcggttacgatcggagcattcgcgttaacctgccgcaaaacttcacgtcgcaggttcttatccgcgtgagccgagtaacgccggatgctgacggggtgaaggttgtcgatgccttccaggttcaatcctacgctgaggtcattgatgcaaaattccgctacccgttaacggccatgctttacgttgagttcgatagcgacctgttccagaaccagatcccaaccatctcactcaaaaagaaatggaaaattattcaggttccgagtaattacgatccgattaatcgcacatactccgggacgtgggacggtgtttttaagtgggcgtggagcaataacccggcatgggtgctttatgacctgatcatgaatcagcgctatggtttagaccagcgtgagttaggaatcccggttgataagtggtcgctgtatgaggtggcgcaatactgtgatgaacttgttcctgataatcgcggcgggatggaaccgcgctatttgatggatgtaattgttcaatcgcaggttgaggcgttccagttggtaagggatatttgttccgcgttccgtggaatgacgttctacaacggggaaagcctttcgattatcgtcgataagccgcgcgatccggtgtacctgtttacggctgataacgtcgttgatggcgttttcgttcggacgttcccaagcgaaaagacgatgtacacgtcgtgcaacgtcatgttcgacgacgaagaaaaccagtacgaacaggatgttgaaccagtattcaaccctgacgcagccatgcggttcggccacaacccgaccagcattacagcgatcggatgtaccagaaggacagaggcgaaccgccgtggtcgctggattctgcaaacgaacctaagcgccacaaccgtttcgttttctactggcctggaaggtatgattccttcttgcggcgatgtgatttacgttgcagatccgcattggcaatcggcctttaacctggtgctatcaggccgcgttatggaagtgtctggcgtgcaggtgttccttgcctaccgctgcgacgcgaaggctggcgacactctgatcctgaatacagacgacggcaagccagtgcgccgcacaatcgccagcgtttcggcggacggtaagaccatcacgctaaatgttgggtataactttgacgttgcgcctgacagcgtattcctgatcgagagcgatcagcttgcagcggaacagtatgtagtaacccggattgaaaagggtagtgatgacgacgaatttactttcgccatcacggctacgcagtacgatccgaacaagtatgacgcgatcgataacggggtaattaccgatggccgaccaacttcggttgtcgaccctgattcaatgggcgcaccgaaagacttaacgattagctctttctcccgcattgttcaggggatgagcgtcgagacgatggttatcggatggtctgccgtgcagtatgcaaaactgtacgaggtgcaatggcgcaaggacggtggtaactggaacaacgttccgcgcactgcgacaacgcaggttgatatcgaaggcatctatgctggcgagtatcaggcccgcgtgaggtgcattagcggtgggaatgtagcgtctccgtggtctgaattggcaaccgccacactgaccgggaaagtcggagcgccaaaaggcccgattaacctgtttgcgtcggacaatgagatcttcggcattcgagttaagtgggctatgccggaaggagcggaagacacggcatacattgagctttaccagtcgcaaagcggaaccgatcaggacgcaagcctgcttactctgattccttacccggcggctgaatactggcactcaattttgcccgctggctacgtgaacttctacaaagccagaagcgtagaccggatcggcaatgtttcagaatggactgattacgctcgcggcatgtcgtcgactgacgttaacatcatcacagatgcgatcctggatgaaatcctggatagcgacgcgatgaaggaactacaggaaaacgcacaggatagcgcggcaaaactcaatgactacgcgaacagcatcattcaaaatgcgctggcgaatgatgcggacgttaggaaaatgacgaaggagaacggtaagcgtaaggcagagatcgcgcataccacggtgctgattgccaacgaatcagaagcgagggcggctgaaattacgcaacttaaagcgcagattgatgaagatatcacgtcgcagattacgatccttaacgaagccctggcgacggaaagcgagacgagagcaacgcagattggtcagttgcaggcagattttgcggctgatattgacggcgtaaaaacaacaatgaacgctggttttacgcaggttaatcaggctattgcaaatgaaagtgacgcgcgtgcaagttccgaggcggcactagatgccaaaatcgggcagaactccgcagcgctaaaccagaaactcgactcgtgggcgaacgttaatggcgtcggttccatgtacacgatgaagttgggcttgaggtacaacggtcaggagtatagctccgggatggccctacagcttacctcaagtggtggaagcgttgtttcgcaggtgctgttcattgctgatagatttgctatcatccgtaatgcggcgtctggcgcgtacacgctaccgtttgttgtgcagaatgaccaagtgttcatgaataacgcgcttattcaggacggttcgattaccaacgcgaagatcggtaacgtcattcagtccaacaactttcaggagaatgttgcaggatggaggcttgataaaaacggcgtatttgtcaactatggctcaacttctggcgaaggttccatcaagcaaacgaaccagaacatcactgttcgagatggtagcgggcgcgttcgttgccagttgggtaggatcactggatcatggtaaaattaatgccgggagaaatcccggcttaaccaaaggaggcagacaatggcttatggttttcaatcatgggatgcgaacgggaaccccaacaactatgggatcgtccctgtttcagttgctggatatattgcattagcgcaaggccagaaaagcggaacgtggtattacaacgtcccgcctgggttgaggcttggtttcttttgggtcgcaaatcaagaccagtacggcacatcgaagaggcgaattaccgttagtggtaatcagatcgttgtttcagatgcgccagatgatgcgctggaatcaggcgtctacccggcgacgcaaggttttattgtcgttcaaattatgagttgatgattatggcagattacggaattttacttaccaatgatagcggcaatgtttgggtttcgcctcaaagcatcccactggcactactatcaaagcagagcatcactcttaggggtggtactaactccgatgaagtaagatcggtaacttacgacacgaatcacccatgcgttccgttcgtggtctttcatggatcttcgccacaaggtgcattcacaaaaatcaagtacagcggaaacacttgcagcgttgttttttcttttggtaagcaaaacgtatatgcggaggtttattttttctccgtgttcccacagccaaatcctggttatgggcttgcaatttgggatgaaaacggcacgctgattttgaccaatgaaaccagaacactttcagacgtacagacctacggcactggttttaatctaaacgtcactaacggcgggaagtgggcggttagtcctgttcagttaggcgcgatcgttggtgttgttcgcgatccctacccaagaccatttcagggcgactattgcgcagcggcattctttaacggctcaagcacgcaacttaccgcatatctaacgcaggcaccaggaggagccgccagcgatctaacctacgtcaatatgaaaaacacctgcatcgctattgattgcgcaagatacgactaaaagaaaggggccatacggcccctttttctaccccttgagatttttgatctcctcttttaattcatcaacttgagcagacagagctttgattgcgcaaattgcatccatcaaaagagcattattgtcaagcacaagtttcttattttcaactacgttaccctcatcatcctgataggatgcgctgctttctttaacgtagcacgaatcgatatctcgcacctgctgtgcaataactcccctacgctcgcgtttcttaacatcatccttataggtgaacttgaccagattcattgctttgatgttttcgagtgactgcaaaccatcataagcaacaacattgtctttgtagttaatgtcagatagaccagcaaaaacaacgttgccataagcagtgcttgcaatattaccatctgatttaaactgccaatactgcgtattaccgccagttccccatttgctgacctcaataacggcacgatgttcataacccctatgttcctcaagccacatagcgcaacgcgcaccgttaccattaatgttgaaccgtgagataaatgatggagatttaaggatatcaccattattcccatttggatcgctagttggccacgctacaaaagcatcattaacggtactcctcacagtcccatatgacacaacacttccgcgaagatcggcagccccgccaactcgcaacgtgctcgacattgtaacagcgccgcgaagatcggcagccccgtcagcacgcaacgtgcttgacattgtaacagcattgctaaagtttgcattcaacccggtaacagcaaagttcgatgcatcaaaaacaacctgcttcgcgctgttcatatctccattagggcggaagtacattccttgaccattttcagggattgagtacacgatcgcattgctgttatttgccctaatagtgcaaccgttcagggtcagcgtggcgtttcctccaggaacgctaattgcctgcggctggctgaacgtgttagctacgttggtgcgcgggatcgtattatcattagccatcaaatagtcagacggtgaattatatacaattccagaaggctccgtgtcaatccaggtataaccagtgcgatcaatgattggccccgtaatcgaccctttgttagcctgtacgtttacatgattcaaccacagttcaggaacccatccgccgggagcatgaatataaacatcaaacgaggagtctgtgtttttcaccaccccaagattaatgcgtctggtgtcgtttggtctggcagcaatcagggtgcgctgagtaaaccaagtgtcaatattattactggttagcgtatcgggaagaccgcggccagaaatcgaaaagatatcaaccgggagatttgcagtgccataaccagtacctccgccaatgatgaactgagcaaatgcgtagccatcaccagcgttcttgacgttggcgatcttcatccacttctccccagcgaaagtgccagtaattttatccggcacctggacgccagccacaaggtcgacaacctgatcacgaagattttgcgtctgccccttcgcagtttgcgcgtcgttcttcgccgagttggccgcagtttctgacgcttttgcattggtctccgaggttttggctgcggtttctgatgcctttgcattggtctccgagtttttggccgcagtttctgacgctttggcgttggtctctgaggtcttcgctgcggtttctgatgcctttgcgttagtctccgacgtcttcgcagcattcttggatgcagcagcattggtctctgaagtctttgcagcggtttctgatgcctttgcattggtctccgaggttttggccttattctccgaagatttagcgttcgtctctgaggtcttcgctgcggtttctgacgctttggcgttggtctctgaagtttttgcagcgctttcagacgcagccgcagccgtagcgcttgcgcccgcagcttcggaatctgccctcacctgatcggcaagactttgcagagcttcgaaatcgaagttcttaaagaagtcgacagcatccgcaatttgagtttcctgtgactggtagtagcgcagagtttccgcaacatcttgcgccagtccgtcaacggtcagcgagtcacttaacaggatcgcgtaatcgctagacgctacgacagcgccttttgtggtgatggctttaatttcagtatcgctaaccaccttgtttacgacggccatttgaattggtgacgacaaaaacataatcgtcgcaccagggcgaatcagcgaaagcgatgattgccattttgtgccagtcccggtaacggttccgtctgcggccatagccgctttgccttctctgtatagtgccatgtttttaagcctcattggttgattgagtaacgcagataatagcatcaatgaaccgataaaaaaaggagcctttcggctcctttagttgtcaaattagaacgggatatcatcatcgaaatccatccccgcattcccgccgctgttttgcggcttaggcgcttgttgcggcttgggttgttgaggctggccccacccggattgctgattgccgccgccgctttgcgaaggatcgcgctggctgaattcgagttgcggcataatcatttcgttgtggctgtaaattgtgccgttgtgctcgcggttaacgatctgaagcgtccggcaggttacgctgatcaccttatccatttgcagcgcttcgtcgtaccacttaatcatgttttcttttgcaaagaaaactgcgcggtagttcgtgtaaattgtttcgtcctcgccatcacgattgcggatcttcatccgctccgacaggtctacggcgtacattttccacggcccgttattgttgctgccctctttgacataaggcgcttttcggattacccctgttacaacatgcattgtcattcctatggggcggcttcccgcccgttaaattagttgaaagatgaaatatcttgcgcttctggttcaggttttgattctaccttttccggctcgcgcttcgcaacctcttgcggtttaccggggttaaatccgtttgccggggtgactttcagttctgcctggcgtttggtgatatcgtcttccgtcattttccactccgccggggttaacgtttgtttcgccagcttatagatctcacgaagcgattcgagatcttcgcacgcgtcaatgcgttttttgaagtctttcggtgtcattttcgtaatttctgcatcatcatccgcctgcttgatacctagcgctgcggccagcgcataacggcgggcgtaagatgttgttgagccgtatgcttgttcgacggttttactgatcggcatattgtactgaaacgccatgaactcgccgctttcatgcaaaaacatagtttcgaggtgcatcaccttttcggtgctcgtatccatcatggattgaatgaccataattttgttcttctccagcgccggggaaatagcgtcgaggatatccccaagattcgcataggtgttcccaagatggttgttcttaccgcttttctttgcggccacgaagccagattttgccttgattaatgcggctgcgatggtggtaaatttttcagatgtacgcatgataaagtttccttttcctaattggtaatgcgcactatatcacaagtgcgcaccagtgtttagctatttgtgccgtatacgtccgggaacatgtatttcacaaactgaggagtcggcaaaacaacttccgccgcgtttgactcatatgatggccatgaatcgtgcttcacgcattcagcatactgatgaatcacgctttgatactgtttgcgaccgatctcgatctgctggctggtcagggtgaacgccagcggagcaaacggtgattttttctcctgcgttagcagtctgacaactaccgggcgtttttcgttgtaagtcttcacgaacagatcgcgctgcaatgccatcttgagatagtagcccaagttgaaggcgagtcgcccgaaatcgtcaggcttggaagattgcgtggttttgtagtcggtaatcaccacgacctcgaaaacctcatccgggttgaacccccactccttgatgagttcgggatcggaaacaacgtcaacatgatcgagtcgaaccttaaccttgacgccgaagatctcaccgaagattgacaattcacgctgtgctgtaggcgattcgatacatgcggcgtgtcgcgggttagccagcatcacgctgcgcatttgaacaacggcatcgaaatcaacatccttaaccagcttgcgcccggagtttatcgcggcgctttcgtcgcacagttcaatagcccaccaaacatttacgtcaatcccggcgcgatatgccatttccagaagttccgggtaatccttgttggacgtcccaatcaggccacacgctttcagcttcgcagacagtgccgacttcgacgtaatcagatctttaacctcgcccggagaagtcgcccgcaggtactcgccattaaactttgccgtctcaagcatacaggtatgcgaacaggttccgaacgccagcgcggctgcttcctcacgcactttgaatttccagtgcgccggggatgttgcgtaaatctcgccgaggcttgagccgctaacgtattccgcgcaccaggagttaggatcgtggtaatcatcgttggataattccgcgttggtgtatgccttaaaaattgcttcagccattggtatcactccatttgtggtttcgttgcgttaagtatacgcatgacgattccaggcgcaagtcaaaaagtgctatccgcagttggttaaaaaacgagcgaaatttacgtaagatttagtaagatgcatcttacgtgatttttcctatatatttcatttagttaatgcaaatcggtaagatggtaatatccctataggtaaatatccatgaaaaatatggcgcgaaatccagcgaaaaaagacacgcaccccggagaaatcttaccaagattgatagatacagatagagtaataataataatattgttatttatcatatacttactatctatatattgcggttaattggttaaattttgcgcgaaatttacgtaagattcatcttactaaatcttacctaaagtggttcgaccagctgcaagccactgaatttcaggcataaaaaaaggtaagactgatttgctcaatcttacctaaattctggtcaacatttaatcatagaagcgacgatgccctgtacaacttgcgttcaaatccgagcttaaagttgtcaccgttcggaacgataactttaagatcccgatcgtcagcagccgccagcatatcccgatctccacgacggcaaactacccgcatttctcgcttaccttctccgccattgcctttatacctgtacgccacgatctcgacgtttgaaggtatgatgcaggcccaaacgtcgcacttgaacgaactggcaatattaaagtgcatcgcctcaatccaggatcgagcaaggtaaatcggcccgttaccgtcgtcgctctgattggtcactatcaccgatccgaatgtcagatcgccagccaacatcttctcccgaccctcctcatcaatgaacagcatgttgcaatactcatcatccggcccatcctcatgcactagttgcattggtagcgcgtgaattagctcctgtctgcagttctcgtgagtttttacgccaaccagatatgatttgatatgctcattttcaatgccctcatagagcgttacaggcgtgctatcgacggcctccgttctgtttaaaactgccatcactctttcatgatctgccatctttccgtagtcatacccgttatcacgagctacctgcttgtttctcttgactacgtattcttgcggaacctttccgagatagcgcccaagaatgttgatgcactcgctatacggctggccgcttaacttcattaaccagccgatccccttatcggcaccgcaaccgccacagtatgcgccgccatcacctcgcgtttccagcttgtcagtccagcggaatcggtctttgccgccgcagttcgggcagtcctggtgcttgccgttgaagtatcgagagtggatgccgcaaatgttctgcaacgcctcgcgccacatgccagccatgtacggcaaaacctctttttcatcgtaaaaatccacgtcgtaacccccaaataaaaaacgcctacacgagaatgataacccggcaggcgtttagtgtttagtcaaattgtgctatcggactacgcggagcatttcgcggcggtcgcatcggcgcgtcactggcttgccgttgctgtcaaatcttaaatcaggtcggcagaatgaggcgcgaaaacctttgcaattgttccgtcggtagctcttatgtactagataagcgccatcggctgagatcataccgcgcttacgccactgctgaacaacctggatactaactcccaactcttttgccgttccagcgataccaccgaaggcatcaataaccagctccatccgcgcagtcaacccagctcgaacctcatccttcagcacgtagtaaccagtcggtcgcttgcgtttcttcttatctttcccgcgcgacgttccgttgttgccgttcaaggttcgcttatcaaccattgccatttgctccataattcaaccctcatagcattttttgttaaacctgataaaatgttccatgtattatacacgcaactatgcgaatgacaaattaggattgacaatggcaagcacagaagaagacgtagcatattttaagcgactatttcgttatgaaggcggaacactgattcgcaaagttacaaccagtagtcgtgcattcgctggagactccgtagggtgcgagaacaacgttgggtatttacaggtaagcgtaaaaagcaaacccctatacgttcaccgaatcatttgggaaatgcataatgggcctatcccagaaggaatggagatagatcacatcaaccaggtcagaacagataacagaatcgaaaacctgcgactggtaagccaccaagtaaaccttaaaaaccaatcgatgaacagtggcaatactagcgggcacgctggcgtaagctggtttaagcgaggcggtaagtggagggcaacaataaaggttggcggaaggcaaatacacattggttacttcgcgtcgtttgagtcggcagttgccgcacgaaaagcagcagaaaaacaatatggttttcatgataaccacggagcagagaaaaagaaatgagcttatcgattgagcaacaaatagatctatacgcagacaaaatcccggcaatccaaaagagatttaccgttggaaatatcgttccgtatccatatcaggctgtggcttatattgagacagccaaaagaatagcaaactacaccgcaccgttttacattaaggcttcggtttccgccgggaaaaccatcatgatcgccatgctcgcagcgcagtgcaaggcaatgaacttacccatgatggttcttgctcgccaggccgagatcgtgaagcaggattccgaggagatcagtaacctcgacgttccaaactccgtttattgtgccgggttaggcacgaaggcggcatacttcccgatcgtcgtcggatctgaagggacggtggttaatggcctgtttaaaatgctgggcgactacgtgccttcagttctggctattgacgaatgccaccaggttgactggcaagatctggcggaagcgatcgccaacaatgaatcgttcgagtacatgagccgaccgaaggataagccgtatcgcgtgaacggggaactggtcgatgccgaccacccatacgacgaaaaattcgacgacgtagaattcggcggcggtcgcacgcagtacactatcgtcatttgtgagttaatgcggaggtgccttgagaagacagggcgagaacttcgcatcgttggctatactggttcggagtttcgcggcgtcattccgattttacaggaagacaagagccagcctggtttttggcgcgagcagatcaccgacattaacacaaactatcttgtcgagttcggatcggtggttccgacaatttttggtgatactgaatccgaagggttagggtatgacctatcagaattccacggttccagtcaggacggtacgcaggattttagcgcggaagaattgcgcaagatggaaaagaaaatccatgaatccggcgaaatgacgaagctgattatgcaaaaggtcgtggagcgtgcgaaaacccgaaacggagttctgataacttgcgctggacagcggcattgcaaggaggcggcgagctatctaccgccggacgcaacatacgcgatcatcaccgaaaagacgaactcaaagaaacgcggcgaaattttggataaggcgaatcgcggtgagatcaaatacatcttccaggtgatggccctaaccactggcgttaacgttccattttgggatttttctgtgatattgcgcaagatcgggtcgcttacgttgcttattcagcttttggggcgcggaatgcgacttctgaaggactggcaaaaacagccgccttactcgtgggtgaaagaagatcaccttgtctgggattttgccggaacaatggatgacctgggccagttgtatttcgatccgatcttggagcaggcgcaataccaaagacgcaagagcagcaagaacggcccgaaaatttgcccggtatgcaagggggaaaatagcgagtacgcccgcagatgcattcacaaagacagtaacggcaatcggtgcgaatacttctggatctcgcagaggtgcgaagaccagaaagacccgcgaacagggaagattaaaatcaaggggtgttacgctgaaaatgatattgttgcccgccaatgcagatgctgcggcgttcagcttaaagaccccaatgacaatctcaccgggaagcactatacgcagaatgactggtatgatgttgtctggttcgatatcggcttgactcgcaatcagtccgggatcatcttcaattacgtgttactgaaccatgacggcgagcgattcaccgcaagggaaaagttcttcccggaatcagagaatcagatttgcggcaagctgtggcggcaaaaggcagtcttccagcacgttagcgacgcggtaatgcgtggcaagttgggcggaatgaaaaacgcccgcaagatcctggagtatgcggaatacttccgcgcgccgaagcgcgtaacgcatcgcatcaacggcaagaaggaggacattatttcccgcaaagactttggaggcgaggagtgattacagacaaaggggattacctcgaatattacggcgggcctgtaaaggcttgcccacttgaaaaaatcgaccagatgaacagcgtttcgtggctgcgttacgaataccccgattatctgttctggcatacggttaacgagggtagcaagcacaaggcgagcgccgttgcagatcatcaaatgggattgcttaaaggcgtaagcgatatccttgtgctgattgggctgggcggaaaatacccgttcgccgccattgagctaaagcgccagggtaaatcccaggcatcgccagtgagcaaggagcaacgggaattcctcgccgccgtccgaagccgtggcgggttcgctgccgtggcctatggattcgagcagtttaagatcgcgtttgaagacgcaatcaaatagcactttttgttaaaactacccggcgcgagtcgggtattattctcccatcgaaacgaagaacggagtatttaaaatgaaaaagattattgctttaattgttctatctcttgttctcattggttgtagcgaaaaaccaaaaacatatatttgcggtaatgaatcgtttgaagttactagcgactatattaaggtggttcgcggtaatagcgctggcgttttaattgatggcattggtgaaaaccagtataagctggttacaccacttggaacggctttttatactgttaataaaaacaccattgatattaaagttagcgtttatcagaacactttaacttgcgaggttaagtaataatggcaaaagatatcacagacaaagacactcacgacgcgttcacgactttcgaacagcttgagcgtgaaacgttcataggcaacgcgcttgccactggcggacactatcaggccgtcaagcctgataaattctaccaggtaacgggcaaccgctacgccgggagcaagacgccggatatcgtccgcgacaagtggtcaaccgatcgcagccttattgcttacatggaggagcgttacgggccatacgacctggacgccgccgccgaagaaagcaacaccgtctgccctaagttttacgacgaaaagaccgattgcctcaagcgctggtgggggaaaaataagcacgtatggcttaatccgccttactcgttcccggatccctttgtgctgaaagccattgagcagatggagcatgacaaccagatcgatattttgcttcccggcgacaactctactgcgtggttccgcgacgcacagaaggcagcggctgagatcatttggattgtcgcagacgtcacggaggacgaagacggaacgcaactaagccgatccggtcgcctagccttcatcaacggcctaagcgggaaaccagtcgacaacaacaacaagggtagcgtgattttcatcatgcgcaaactcaagccgggcgaggagcaaaaaacgttctacgtcccggtaagcgaaatctgcccttcattaactaaaaagcgcatgcgcaaacgtgggatctgaaaaatggaacagcttgaatctttcaccgaatacctccacatcgtcgtcactctgctggacaagtacggcttcatcggtacggatgaagaaaagatggccttcgccgatagcatcgatggcacttatcaagaattcatggataacggcacgccgcttgctgactggcccgcgattcttgagcgcgaattgctggattttcgggcgcgtgaaggtgcggaatatttcgcgaaacagcactaattgttaaacaatgcccgccgcgagcgggtattattgttccatcaaccaatcaggagctaacgccatgaacaccaaaaccattgccgacaccatcaagatcgcacaagttaagccgcgcatcgtatctcgccacctgattaacctttctcgcctgtgcatggccgactacgtggcgaagcctttagagaatggccttgatggtgaaatcggtgcgatctacttccgcgccgcgcacggcatcgaagaaattcacatgtacgagcagatggcggaatgcttctgcatttacggtgacgaatgatgattgtagaatctggccgcgctgccgtatggcagcatgccaaagaggctggcattagtgacgatatcgtgatgatcgcaaagtatttcgatatcaaggatatctccattgtgttcaatgggaaatttacctatcttcatgagcgaccactgaagcgaacgcgtatagcggttgcgacgcgggcagaggccgacgcgctgaagatgttcattcacgaatctaagcagaccaaaaaatattacaagtagcgggagtgttgagaatgcgatatattgcgatcctgattacggcggtggttctcactatcgcaatcttcaactacgcaattcaattgggataaattatgcaacctaaaatcacagacgaagaatttttagccgcccgcgaggagggcaagacctaccgcgagatcgccgaagagttcggcatgaacgttcgcagtgttgagcgtcgcggcgttcgacttgcccgccaggggcatttgcacggtaacaatcacgtagcgaagcacatcccggacgggttcggggtcaaaggcacatcgaccatgattcgcgcgaacggtgatgaagttgtgcgctgggtcaagtcagaagtagaccgcgaccgcatgatcgctttgatggaggcggcgcaagcatcattctgcgaagacctacctcgcgctgaaccgcagcctaaggatgaatctaagttttttattgaggatcagctcgccctgtatccgatcttcgatttgcacatcggcgcgatggcccacaagcacgaatgcggcgagaactacgacaccagcacggcggaaagggttcttaaccgcttctttgactactccgtttcggttgccccgcagtcgaaaaagtcggtcttgctggtcggcggtgacttccttcacagtgacggcctggacgcagtaaccccggcaagtggtcacgttctcgatcaggatagccgttacgcgaaacttgtttatgtggctattcgctccttgcgccgagctgtgtcgctactgctgagtaatcacgaagaagtagaggtgcaggtaatcgaggggaaccacgatcaggctggcatgatctggttgcgtgcagcgctcgcagcgttctatgaaaatgagccgcgcgtattcgttgacgtcagccctgcaattatgcatcgtaccgtgtggggcaaaactatgctgggctacactcacggccacacgatgaagaaggcagaaacgcgcctcgccgcaatggctacagacttccgcaaggaatttggtcaatgcgactacatctacacgcattcgggccattggcatcaccagaccgtaacggagcactcgttagggattgacgaagtacacggccagttaggggccaaagacgcttacgccgctcgcggtggttggcgctcatatcgccaggcggcggttattctgtacagcaaagaatatggcgaagtaggccgctttatctaccgcccgaacatgtaaccacaacggccccgcgaggggccaacaaggaaaaccaatgaatagaaatatctgcattttcgatctcgatggcacgttgtccaatggcaaccaccgtttgcacctgctgccgaaaaaagatctccacctaaccgaaagctggacggcgttcaacatggcggctggcggcgacgctcccattacggacacgatccgggtaatggaggccatgcgcgcagcaggatttatcgtcatcatcctgaccgggcgaagtgatgaggcacgcgagatcactgaaaaatggctggtgcaaaatggcgcatcgcattacgacctgctgattatgcgctccgcctccgacaaccggaaagatacggttatcaaagaggaaattttacgcaagattggcattgagcgaatcgttgcagcgtgggatgatagccccactgttattgcgcacttccgtagcctgggtatcacaacttaccaggtctgcgactacggcgaaaaccttcacgaccatctgaaatctcatggagtagacaaatgaaaaatgtaatcatcctcaacggagcgccgggcatcggaaaagacaccatcgcggaaatcatcgcccgcaaatgggagtatcggatcctgagtttcaaatcaccgatgtttgacattgcgcgcgccatcctgggtgcaaccgactttgcccgcttcgccgtccgttaccacgaccgcagccggaaagaagtaaagtgcgactttttaggcgaccgctcgccgcgtgaattcctgattcacattagcgaaaatttcgtaaagccgacgttaggcaaaaagcagttcggcaagttgctttgcgattctgtcgtgaattcgcctgttagttgcgtcgtcagcgacggcggatttgacgaagaagtagagcacatcgcggcgcacgatagcgtaaacgtctttgtcgttcgcctgcatcgtgacggcatgactttcgagggtgatagccgcaagcatattagccgcccggatctgatttgcgaaacttatcacgaattcgattttgatatgacgactggcgagccggaagacgacgcgcaaaaaatccttgatatggttttcgaagggtattaatattctctacgtaatgcctttattatcaccgccttaaactttgggagccttaacaggttcccttttttttgttctttatttggcccaacgcatatatcatcgcattatcacttaactaacagaggttgcatatcatgcgtgaattcatcaacgcggcaaccaatggtagcggcggtgttaccctcgcaggctctgcgaccgggcaacttatcattgcggccattggtttatttttcatgattctattcggctcattcggcgcgtggttgcgctggcgagattcaaaggcgctgcgtgaagcgctggaagccggggatatcaaaacggcggtgaagatcaggagtaaataatatggggattaaaacgcgggttacattcgcagcggcgatggcgatcgctgtcgccttcctcccgaaagtggaggacacgaaatacaaggtttataccgatatcgctggcgtttcgacggtctgcgaaggcatcacagggccggacgtaatcaaggggaaaacctatacccggtcagagtgtgatgcacttttggagaagcacatccaggtcgcaaagcgtgtggttgacagcaaaatcaaagtggccgtgccggacaccttccgggcgtcgatgtacagcttcactttcaacgcgggcggtggcgcatactccggcagcactatgctgaagttgacgaaccaggggcggctatatgaggcgtgcgaacagctttaccgctggacgtactatcgcaacccgaagacgggcaagatggaaaaatcgcgcggcctgcataatcgccgggatcaggaattcaatctttgcattaaggatctaaaatgagtagcttaaattttcagcgagcattggcaatcggcttcatcgtgtgggcggtcgcactggtttccggttgtgcttccagcgtcccgatcctttccgatctggtgggcagcaagccggatatgacggcgcaagtcggtgcggagaacgtgaaacaggcggttggcgtgacgaacaaaacggacacgtccagcaagcaggaaacgaccttcaaagaatcggcagttggcaaggttgacacttccaacaaaaaggcggtgacgacctccagcattcacgcgaaccagattacggcggagaagatcgagatccgaaacgacggtagcggaagtgtgattccgtggctgattggtgcagttggtgccatcatgttcgctgtcggtgttttcggtatgtggcgggaacgaaaaaataaaggggcgtaagccccttttttcatatgtaccgtttgacgtgcagcagcgccacgccatcttcatcattcaacccatgttcaaccttgtttgtcgcggccatgccttgatatagcaaggtgagcgcggcacgcaagtaattttctggtgtgatctgattcacgcaaacaagcctgtgaacctccgttatcagatcttccacctgctttcccgaatagggcttcatcgtcgagttgctcaatgtgcatcatctcccacatgtatttgttttccatcccttcaaacgaccggaagttaaatccaatctccctgttatccgggccagtgcaccacaccacgccgttttttccgtccaggtatccattcgtatagcttcgcgctaaaaactccttagaaaccattgaggcgaacatacggtgtgacacgttggcagcttttgccatgcgtggcgattcgcggtgcatgtaaacgaacttcgcaaaatcttgccgggtaaattcccggcgagactcgcagaatcggtaaatgtcaaggataaacattcattacctcatgaacgaaggattaacgaacacttccgaatcaatcacgcagacgaaacctaattcctccatcttcggcagcaatttttccttaatccttttactcaccccggactgacctttgaagatcttcagattgcggcacgcgttatagatgctctgaacagtcatcacgcctttcgactgcttgcaacggctggcgataacatcgtacacggccttaatctccgcaccctcaccagcgaagccggacgaatcagccgacgacaaatacgttttgctcaactcatgaaacatgatgatggcttcgtcgatcgtttcggttccgatcttcttcgagcgcttgccgccaggttgccagttgcggatagtgtggattaccgacgccaggcgcatcacctgcttatcgaatttacccatcgcaccgcgcagcatcgtatgcgaatacttcccgccgtcgcctaattccggctctaactcctggcgggccttgttcagccgacgcatgcctgcttcagtcacttccagcttgatatacgattcagtcataatgtcatgaatgaggcggaagtaatcagcgcgtaaagacttgtcgatcggctcataggtcgaattccctttttcgtcaatgaacacacgctcacctaaccgcgtttgctcgcgaaccaaaaggaaacgctctgatacaccgataccgcgagaaccagcttgcatgatggcgtcgatggtttcatcctgggcgattacgcaaatacagcccagcgcgacgaatgacatattgttactgacgtcggaacgtgcgatcgatacgtggcccttatcccacgccttcaacaccagttcgctgttcgtcttcttgccgccgtcgttgccatacgtgatccctaacaggctgttaaccgccgtcgcttcgtccgagataaccgcaaagttgccttgccgattgttgattttcgccaggccttccggcgtggtatcggagacggggaaggtcagatcgcacatgctttctaacttctcctcaagttcgtctttgtcttcgaacagtttcgccatatcagactgcgataactcgcctttcatggcctgcttgttggcggacaacttcgccatgattttcttgcgctctttcttgcgcgcctcgttgattcgctcaacctctgcgacgatcggatcgatagccagcgagttaatcgcagacttaccagcggaaggcggctgcgacgtaatgacgtaaagcgtcgtcggttgctcgctgccgtggtactccacccaaaagcgacccatcatcgcggcggacacggttcctaggaaatgcatataagccgatgattccgggaattgaacggagcgagcggcattgagcgccagcttgccgacgatatcgtaatcattcgcgatcgagatcgtgggatacttgtccgcgtttacgtcgatatctttcggcttgggccagaaagaaacggagtcgcgatacccgttcgcacggatggcgacgcgcaaggggctgatgccttccttctctgcgatggcaataatatcttgtggggacacgcggtcatttaaaaacatgccttgctcctgattggttaatcgtgcggctaatgataagccgtcttaaatccgagatccagtgataatctaaacgcacttgcaaaatgtgcttaggttatcggggcgcatggccccgaatccgttacaggtatttcgcctcaaacgtggtgccgtccgacacgctgaaaccgacttcctcacggtagagcgtccagcggcaaccgtcacggtcgaagatgtatccggcgactccgcccagcgcacgaccgctttccacctggtaacgcttgccgacggtgaaggattttttcaccgggtttttgtggtcgaggccaacgcatttcagggttttcgttttcagctcgataaacgtcgccaccaccacgccgccgacgccagcaataaacaactcaccgctaatgccgaccgacaagcaaactcgcttcttcttcagttcggcactgttatataccatcattgacacgttgccttcgtcgtcaatgcgagcggaataaaggttgttttcctggatattaacagcactgcttgaggtgcatttaattttgattgactttgccattttatttcctgtctcccatttcgatatagaggtttaccagatccagaaagtcggatttgtttctgcaactcaatttaaagccaacgtgcgattcgatcttattttgcatcgctgccatcgttgcgccgccgttattcattttcaaaacttcgcggcatacatcggccagttttttagatatcatatttcaccaccgtaattttcgtgtttttgcaagcgtcttcgatatcgctgattaagcgcttcacccggatatcaatcattgttttgtggtgcatgacgtcaacaatcccgcaaacgcacaagatcatgattgcaaagaggaagccgcctgggcaagtcattgataatgcagttgctaacagcgcgataattaatttcattttgtttgcctcgttttgtttcgatggagtaactatacccgcaattaagcgggtacgtttagcaattcgtgctattcattaaaattagcctggaacacggcgcgagcgaatccgcgcggagtgatagaacgaagcatctttgttctttcagacttgccgccaaggaatttccacgcccaaaagaaatcgacgccttccacgccttcaggcggcaataaccgctttggctccacgaatccgttaccgtgccagatgcacgttttcttcgtgtaattgtcgcagtgcggcatttttgggtgccaaacttcctcatgcggcgcaacataccctccgaagtcgcgagggtggaaataaaaatccggcttgcgccaaagagtcgacaatttgccaaccgggttttctaccatccagggacaattatattggtcgcccaattgctcgatcatcttcgcatcatcggcggctgatagcacatcctgagtctgccgggcgtgcttcaccccgctatgcgctaacagcgtgcaggacgggaaagcgaaaataatgtcaggatccgggatgcccaggatcgtgcgcttcacgtcgaaatctttgtcaatccacatgttgacatactggattttggcatgctccatgcggattttgtactcgccgtggtcgccggaatcggcattgaagcaatacacatcgcaaccgcgaattgcccacggtagacccataatcccggaaccgtcaaacatgcaccacacaacgcgctttttcatcgtcacctcaccagaaagggatacattcgcggcaaccttcttcaccagtgcagccgcaactattttcttcttgctctgccagatcgtcacgcatcggcagactttcggcatccatatccatactgcccagggcatccgatagcgtcatttcctgattggctactttgatgcaatattcgcggttaagccctgcgtcctgggcggttaagaaacggtgccagtaggcatcgtcgtaattatcagccatttcttttcctccggttaaattctcgcaaactggcggcgcatgacttcgaacaggttttaccccagccacgtttaagatccgccgcctttaccttatagacggccccgcatcctggagcctcgcagcacttcatactttccttcgccccgatgtgatccggtcgaccagtcagggagctatcgccgggattcttcgtcgaccagaaaagttgcactgtcgcgacctcctcgccgaactcattaacgaacatgtaaacgcccttgcttttcagaagcacggtgcaatgatgcatttcgccgttgacttccaggtatgcgcgatcgccttctttcattagcttctccacgattcaatgaacatgctgttcgattccagcgtcagcgtgacgccagccagggaggacggaatcaggcgagcgcccggaaccgttccgacaacatagcgaccattcgatttggtaatcgtgatctgagtaaagccggattcgcggttcatgcggagaacgacgcggccatgtgcgttcagtacggcgagaatggaatcagtcttcggatggttcattgtgtaactccttcgtttgttggtgtggggacagtatgccactatccccaaattctgttttagcaattcgtgctattcgggaacgcaggtcgtgtaatcctggcagatgtagattgtgcgctgaacacgctgcgcggcatcctccaggctctgaatctcgatatcgttgctgtcgacccggcagggtgttgcaccgaagatgaaataccccgtctgcttgtcgttgatttgccacgccttgctttcgggaaccgtattgacgacaaacggcgtgtcgtcggctttgaagtcttcagggtgacgcccgtaatagtggatgattgcagcagttgccgccgccttaaacttttccgtcacgtcacgggcggcgatatcacgcgagatctggatatcaacatccggcgcgccgaccatgtaggtaaagctgttcgaaatggtaactgttctcatttatattttaacctcgtttcggtggatgaagtcggcgacatagtggcactcgatcgggttttcgatcccggcgagaacctcacagcgcccgttgttcagtaactggcaatgctggcaatcagacccgccaacattagctatgacgatggcgatcccgttgcatgaaccgccaaacattctgtgcgggaaggggtaagcctcgcaggtgcaaaccacctccccggccctccgctttctcatgcgctccccttctcgatgcagaagacccaatcgcgagcatcaaccgcgaagcgtgccacgccgtcgagcacgatgaaaacggtctgcccgttaacgccgcgacccttctcaatatcggtgacggtgcggaacaggtcgcttgcgccatattgaattttgtccccgattacgacgtcgccaaatgctttcatggttgatctcctgactggtttcgatgggttaactataccaggccttgcggcccggcgtttagcaattcgtgcttatttcactgctttcttcgctgccttgtacgcctctttgaaggccggaacatcttcgaccggaatccagaagccggatccataaccatcgtcatagcaagggcattggtcgcagtagtcgccccaggttttctcttcgccgccgacagagaatccagtggccattttgcataacgcttcctcaaccgcttcgatcttgtcggcgtcgctatccatgataacgaagttccacttgccgttatactcgctgcccaggttgattgattcgcgttgaagtttcatagctttagctcctttggctcaattcgtttcgttgaagtaatcatagcaaagtcgatcggatggcttttaacaaaaaatgctattcctgcgattgctgattattccaccgattcggaatagtggaatagatggtgattgcatttgattcactggtgattacttttgacgaatcatgattgcttgtgattgtttcattctgtgcaattacttggggaagtgtttcatgatttgcaacgaattgcataaa

SEQ ID NO: 230 - DNA, 47191 bp, synthetic construct
  source 1..47191: mol_type = other DNA
tgtatgcaccatgcacgcaatttgccgatcgaagctggcaaaacgtcgagttgtgtttcgccaacatttacgtcgtgtgggagtgtgggggcggaatcatcttacctaaaaattgcgcaaaaaatgaccaatataagcccatatatagatagtaagtatatgataaataataatattattattattactctttatctttatatatgtttggtaagatttctccggggaggttatggattcctcttgcgcaagccataatttttagatgttccgccgcgaaaaaatgtatatagggatatataggggatgacagcaaatcttaccaaacacgccgaaaccctttgacggcaaggcctgcggcctgtattatcaccttccgaaacattaccaaacgccgtaaatgtgggggaaacacaaatgcaatacaaaggctatgagttcgaagaagtcgacgtgtccgagtggatgcggtacgacgcagaaaagcaagccgcttaccatgaatggctgcaatccataacgtttggcgacgccaccaggccagccggacggagccaggaagcagcgaagccggaaggcacattcactggtaatcgttcgtccgagatccggcgcatgttcctggatggcgggcggcgtatccagatgacggcggaggagttcgtggagaagttcggcgttaatccggtcgacaaccatttccgcaggccgttgctgaaactcctggagccgggcgaggtgttgcgggtgagcctgggggcggggttaatctccgtctttaccgagttcgacgcaatgactggctcacacctggaagccgaggcatacaggcggcagggcgctatctctgagcgggaaagaatacttgccatcattgacgaagtgatgccaggaggcatcatgctaaaaggctataagctggcactaatcgcaaaaatcacaggagcacgataatgaaactatatccagaccaaaacgacccggcggcaccgatgcacctgggcgacacgccaatcgacgagcaggaggttatcgcagccattgccagggcatcggacgacgaaaatccaaccgccatggaatgcgtgacagccgacctgctgttaatgtcatttcttccgggatctgaatcttacattcagcacatcaccgagacgggccaggcagtgacgaagccggaattcatcggagcgtctaacgtcctggcgatgatggccgatgaggccgacaacatcattagcctggattatccacaatgagcgcctttatcctgttttccatcggtgttaattgcggattgctcctggcggcatttatcatccacctgagcaacaagtagcactttttgttaaaacccggtcagagcgatcgggtattatctcttcatcgacaacgaaccgaggaaagcgaaatgattactctgatcacctgggaacacgaaaacagcaagccagaagtgcgcgagttcgagaccgtggcggcgtgctacaacttggcggcaaacggtggcttttacaaggcgcagatcgttaacgagttcggggttgttgattatgaattttaaggcgagcgacgtaaaacctggtgtagtctacggatcgcgcctcaataaccgcctttggcgctgggacggcgaaactatgtggactaaaggcgagggcgatgttatatggcatgaatgcggctggcctcatcccacaatgagccgcctggatatcgcttattatctttcggtcggcgatatgcacgaggtcgaagatagcactttttgttaaaactgccgtaacgtcatttgataaagtggcgttactgaagtgaacaatccaatcaggagcaacgcaatgaacgataatttaatcgcactgctggaagaactgaattcctacggctgcgcatacatcgagctttcgagcgagcaggttattgaagtcgcaatcgacgatgacgccgggtttaccagattaagggtggcggcaggggccgaagaggaattcgaagactgcggcatccgtgaagtaacaaaccttctcgaataccaccaggtgaaggagatccgctaatgaacaccgtcaaacttatggttgtcaatgcggcccgcgagcgtgagcgccaccttatcggctgcgtattcgatgccgtcgaggtgcacgaaccgctaggcacagtgcacgtaatccagggcggatacctgaacgaattcatcgtcaacccgctggacaccgacgaagatttgaccatccgtgttggtagcgagccggaaaacgcgcttttccacctgcggaaagtatcgaaggcgtcgcagcgcaagttgctggttcgcgcactgaagcgcattgcgaaggagcgcggttacaccgacgcatacatccgcaagttcggcacgttcgctggcgtaggcgattgggcgcggtcatgggccgacttttatttcaacaaatccggcgaattctgttccgtgcatacggactggctgcatggcacagaacacgatcccgtaaacggccacgagtggtacgaattcattgaggcggaattagacgccctttgatagcacgaattgctaaaacgaaagtccggggatggtgcatactatccccacactaacgaacaaaggaaattacccatgaacagcatgaaaattaacctgatcccgtccgacaacttcaccaaagacgacgacccgctgttagccgccgttattcgcgccgggatcggctgggcgcttagtgatgcctcgtgcgaatcatttatgcgtgaaccgttctcacgaatcgcggagcttgaaaagcaggttgctttcctgactggtgaacttcaggcggctatcgccacgatcgagaaggttcgggaaatcatgcgcaccgaacctggctatgacgttgaagatcacgcgcgagttttgcgcatgatggccgacgctttcgcaaagctccagcaatagcacgaaccacaaacacgaatcgtggttgctacatgtcaaccccatcaaagataaggaaaaacatcatgatttacgcaattattgccctggtggttcttattatggccctgtatgcgtgcggctgcttcctcatgcgggccttcctgaaatctgcggattctaccgacaaagaagatctttatcctgtgctttgctggccctggattacactttccgccgttggcagcgtgatcatttcccgcaattttaagtggtgaggcgatacatgaacatcaaaatgtggttcaacggatttacctacaacgtgcgctttcgcgggaagttctattactggtgtgatgagggcggcaagcgctggcggattcgcccacaccagaaaggcgcgagttatgagttaggcattgccgaggcgcaggggcgcgtcgagtgggttaagctgaaagtcatggatggcctgccaaatagcacgaattgctaaaaccgatcaggggtaagctggtatagttaccccatcgaaacgaaacggagttacagcaatgaaaatcaaaataaccaaaatcaacactcttaatggcgacggctcaattaccctggaagaatgcggcctcaaaatcggcgaagttcttgaggtcgacggccacttcaacgacggctcctactgtgtgattgctccgcgcaatagcgagtttatccaggctggtgacaatatcagcgtgagcgaagatgaatgcgaggttgtggaagaatgagcaacaaaatttgggttctaacctacaccattggaaccaacgaggggcgcaaatcgcgccgcctcatctgcgacaccaaagagcgggcgattaggcagcaaaccgttcttggtggcgaggttgtcgagtatctccgcaagcctgaagcgttcaaggtgaactggccggaaggcatggatatcaacggcgctttagcgagcctgcgtgagatgcagcacaacccgaagacgtggagcgaccttcaatgcctgcgggcagagccggaagtgaaggccgacccgttcaccaatattcgggcgcagcacgcggaatggtcggatcgccagttcggtaacgttgggccagttgggccgctcaagcacctggcgaaagaggcgatcgaggccgccgaagcgccggatgacattagcgagttcgccgatatcatcatgttggtatgggacgcaacgcgccgcgccggattcagtgatgagcagttggctgaagcggtggcggaaaagctggaacggaacaagcgtcgggcgtggggcgaggtcaaagatggcgagccttgccaccacgtgaaaaattaacgaaatcgaataccgtttaaagcgcctgtaagccattctggcgggcgcaaatttaaggagtgcgattgtatgcctgaatactcaaaagtcgaagatatgccgattggcgcaacgattacgggtatccgtatgagtgagtcggtcgacgccatcaagccgctggcgttcccggttacgcaggtggagacggacagcagaaaagggttcatcttcatctacaaaaatttcaatagtccgctgcgggttgaagtattcatcgctcgcggaacctgggtagaatgggagaaggccaaatgttcggactgaatgaagcgcagtacaacgccgtaaagcgcatagcaaagcagatggccgcagaaacaaaagacgccatcaagaaggacaagaagacctacgatcaggtcgccgcgaagatgatcgataaacattgggcgcaaatcaacacgctggttactcgcggccagtttatatggatagctggctacctggaaggccgattcggtcgaagggatggcgagtatgaataaaaaacagccaaacgattcagtgacctattgacgcaatcgcgctgatcgggtaacgtgaaccatgtagacacaagaggcggtaaacatccgcaagcctggccccggttaggggcgtttacataggagttatgatgcaatataaaatcatgctcacagcaagaaaaatgggtggcttttgcaaatcctgcattcaagagttcagcatgactattgaggcgaacgacaccgccgacgcggtagagaaagcaaaaaagcaatccggcgtaaatctggatacgcataaaatcaacatcaactacataagggaaatcagatgatgctaactgtgattattgctcttttaatgctttttataggttatcacgtcggagcggctcaccttgtagagcgactttcaaagcgggtacatgaaggcacctttgctgccatgatgtacaataagaaaacggcacgttgggaaaaaattggcgatccggatggtatcgcaaaacgaattgctttttcgccgcttccgtatgttgactgtgagctatttgtgaaactacagaagacgctgaatcggcgaaacaaactgatatgacaaaagaacccgcttcggcgggtttttttatgcccgcgatctgatatactcgcaaatcaacacagaaggaggattacaaatgtctgaagaacgtagaaaacgcgtaacgaaatcgcactttgcaggcaactttaaagcgctatatgaaaaggagttcggcgtggtgctagggcgcacggcagagatgacgccggaacaattttttgatatcgcaaagcgttacttccagtgggccgaagataacgcaatcaaggctgcggagacggcaacgtttcagggcgacgttaacgagtggggagtgaacaagcctcgaatttttacgctaacagggttaagcctgttttgcggcgtgaaccagtcaacgcttacacgctatcgccacgatcctaactatgctcccgtcatggagttcatcgactccgtgatctatgagcagaaatttcagcttgctgccgtcggcatgattaacgcttctttcgtcggaaaagagatggggatcgataagccaccagtgctgaacatcgacgctatcgccggggataagaacgagatcaccgaagagaggttagagaaggcagtgaccaatattcttgataagctgtaagggtcagatatgaacgaaatgatcatttgggaagacctgtcgccagccgataagctggcaattaaggcgcttagtacgcgcaacttttcgctattcatgaagatctggtttcagatcatccagggagaaaagctgatgtggaactggcatcactcctacttttgccacacggttgatgaaattatcgccgggaagcgcaagagcacgatcgttaacgttgcgccaggctccacaaagacggaggcgttctcaatccacctcgcgccgtatgcgtatcttaaatgccggaaggttcgaaaccttcagatctcgcagggtgacgcgctgtcaaaaggcaactccgatcgcgtgattaagatcttctcatctaacgagtggcaggagctatggccatcaaagttcgggcgcaagcagatcgatgaatttcaggtcatggacgataacgaccgcgtaaggctggaaatggtctcccgttcgtccggcggtcagatcgtcggtaagcgtggcgggtacatgacgccaggtttcagcggccttatcgcgctggatgatatcgacaaaccggatgatatgttctcgaaggtgaagcgtgagaaaaaccacgtactcctgaagaacaccattcgatcccgtcgagcgaagaagaagaaaggagacgaaacgccgatcctttccgtgcagcagcgattgcacgcgcaggattccacctggttcatgatgagcggcggcatggccatcgacttcgatcggattgttatcccggcgatggtaacgcgggaatatggcgaatcactccctgactggttgcgacctgagttcgagcgcgacgtgctttccggcccgtcggtggtaattgacggcgtggaatactggtcattttgggaggaaaacgaatcgatcgagaacctggttgcgctacgcgaagccgatctttatacgttcctttcgcagtatcagcaggaaccgatcgccctgggtggcaacgtgttcaagtcggagtggtggcgctattacggcgattccgacaaggcgcacgagccgcgcccggacaagttcgaatatacgttcatcacggcggacaccgcgcagaaggtcaaggagctaaacgactactctgtaatgtgctattggggcaagtatcgggatcgcgtctacttcattgacggaattcgcggaaaatgggaagcgccagatctccgcgttcaggccgaagcattcatcaagcagtgctggcgtcggaacaaggagtgcggaaaccttcgccggatctacatcgaagacaaggcgagcggtacaggtctaatccaggatttaacgaaggcggtaaacggcatgggcgagatcgtcccggtgcagcgcgataaagataaggtcactcgcgctatggatgcacaaccaatcatcaagggtgggcgtgtcgtgctgccggacaatcacccattcgttgcagagcttgaggcggagatgagcgcgtttacatatgacgattctcatccacacgatgatatttgcgacaacgtgtttgacgccgcaaacctggaaatgaacctgagcgacgatccggtagagcgaatgaaacgccttgcgggattgaaaaagctgggtcgctaatacataatgtgggcctgacggcccacacttaaacaaggttgaaatatgaataacattaagatggacgactataatcaaatctttaatggtggcgctggttatgcgtcaaccctcgcgtctatcgcggcaagatttggaacaatgtcgcaggttgaagagttctatcatgaaaacggcatggcgaagaaaatcgttgacgtgatcccggaagagatggtcgctcccggcttccagctaaacggcatttcagataacaccaagtttcaatctgaatgggacgggttaaatctggagccgcaaatcaccgatgctctttgctgggctaggctgtatggtggctcctacgtcctggcgatggttaacgatggtcgcgcattgacttcggcagcgaagcggggtaagccactcgaatctatcgttgtttacgaccatgattccgtttccgtcgcagaggaggaaaccagtccgcgaagcccacgattcggaaagcctaaaatgtacgaggtgaagccgctaaacggcgggcaaccgttcaaggtgcattatacccgtatgcactacatcgacggcgagcgcgtaaccaacaaggtgcgcaagctaaataatggcgctggtggctcggtgctgaacaagtcgattattgaagcgattcttgattacgactattcggaatatctggcgacgcaactactgaagcgcaagcagcagggcgtttggaaggcgaaaggcctggcgctaatctgcgacgacaaagaaggcgagtacgccgcccggttgcgcatggcgcaggttgatgctaattccggcgtcggaaacacgatcggtattgatgcggacgacgaagagtacaccgttatcaactccgatatttcaggcatcccggaattcctttccgcgaaaatggatcggattgtcgccctgtcaggcattcacgagatcgtgctaaaaaacaaaaacactggtggcgtaagtgcaagccagaacacggcgctacagacgttctacaaactggttgaccgcaagcgcaatgacgattacaagccgctgttagaattcctgttacagttcatcgtaacggaggatgaatacagcgtcgagttcgaaccgttgtcgctgcctaccgatgcggagaaagcggatatcttccagaagaacgccaacgcggctcgcagcctcgttaccgaccaggttattgacgccaacgaagcgcgtgatactctgtcggcgttgattcctgaactgaagctaaaaggcaacgctccgaagcagaaaaaacttccggatcgcgccgctggttcaggcagcacgcaaagcgcagagatcttaaacaacacggaggcggatgatgaaagttaacggcagaatcccaaactggcgttatcctgaagcaagcgagcgggagttatcccgctcaatgcaggacgcggtgacagaactcgtggtagaaatgcgggatcgcttagaccgccttaaatttgacgccacggctgaggaaatcagccaggcggaagacgatatcagcgaatctgccatcgtgttcttttccgccgtaattgcggcgctttcctccattgggttgactatctatagattcaattctaaacagtggcttgcaattgcgatcgcggctggcgggcggaacaacgaatcagttatgcgccttaaagaattcggtgctggtgggtatgaagactggtatcaggaatcgctaaataagtggcaggattacgccgaagcgtcaatcaggaagttagcaagcgatatagttgctgactggacaacgaaagttagaaccgccaacaacattggcaagtctcgcaagcagatcgatgaaatcatcgaaggtcgatacgctatctatggtagttggtcgcgcaaccgggcaagcggaatcatcggaacttttaacagtatgttgatgatgcagcgcctaaaagatgctaaagtatcgcattacttttggttcgggatgatggacgaccgcgagcgcgagagccatatcaagctagaaggtaagcgacgccccgttaatggtgacggaatcttccccggcgaagaatacggttgcaggtgctgggcggttccgtcatttgataatgaggatgattgatggttaactttaatgattactttaatcacgtaggaaaggatctgatatggaagcgagcaacatcaaaccgcgtaaaagttggtgatgttgccgggtggaaagatgagcatgggtatgtatacattagattcatgggcaaactgcgacaagctcaccggatcatttgggaaatgcaccacggcccaataccagaaggaatggaaatcgatcatattaaccatgtaacggacgataacaggatcgagaatttaaggcttgtaaccagaaaggaaaactgtaaaaacgtatcaatgagcgtaacaaataagagtggagttgtaggcgtgagttggtgcaagagaacaggtaaatggtttgcatccataagggttgataaaaaagagcgattcttaggtagatacgaagacaaaaacgaagccatttcagcaagaaaggcggcagaggcaaaatacaatttccataaaaatcacggagataaaaaatgaaaagagttcaaaggttcgacacggtaaagatgaaggccagattcgatgagaacggctttctggttgatactccgatcgtggcgcgtatcggtgcgcagacgtaccagacgccaaccgggcagcgcgtcgagttccgcccgcgttcggaggtgttcgatgctgaatcgctggcttcataccagggcaagccgatcactttgggtcacaagatggtgaacgcgcagaacgcaaaaggccttgtcgttggctcgtgctccggcgctggcaaagaagatgggattggtgttcttgttccggtgatgatttacgacggcgagtcaatcgagcaagccaaaaagcgcgtagctgctgagttatcagtgggctacacttcggtcgatatcgatcgcaaaggttggggtaataacgcaactggcgaatattatttcgatgaagaccttccggaaaacttcgaagagatgaaaaatgattccgtctctgattgggttcgctttgatgcagtgcagacgaagattcgcgtgaaccacgtagcgctcgttttccgtgggcgtgccgggattgcgaaattaaatcttgatagcgaacaagaattcccctatgatgacgactcaaaccacaaaggagctaaaacaatgatcattaaaattgacggcgtagatgttgaagtagcagataacgttggcgcttacattgcaaaactcgacgcgcaagttgcatcggcaaccagtcaggtaacgagcatcaccgcagagcgtgacgcacttcagaccaaagttgatggcattgaagatgaagtcgccgcccgcgttgctaaaatcaaagccgacgaagacgcaaagcagaaagttatcgcggttgtttctgccgctggcgtcaagtgtgacggcctggatgttaaggcaatgaaagttgcttacatcaaagaggttgacggtcgtgatctgtctgataaagaagattcgtacatcgacgcttcttttgactttatcgccaactctgataagatggctggcaatcgctccaaagtcttcggcaaaaaagaagatggcgagcaaaaagacaaaggcggcttaccgaaacttgacggcaccgaaatcatcgatccgcaggcaaaattccgccgctaataatttgcggccttcgggccgctaccagaccaaataaacaggagattcaaaatggcacagattccagcttcttattcccgcaagcgtgatattgccgtagcggggcagatcgctgatacgtcgctttataatatcgacggcacttgcgttgctgaaggcgatatcaaggctggcgtactggtggcttccactggcgtagtttccaatggccataaggtcgttaagccagcgaaagcagcgagcgacgtcattgtaggcatcgcgcagttctcgcaagcctactcgcctgaaggcaagtatgacgatgagagcgcggttaacgttatgactcatggccgcatttgggcgatcgcggacgcaactgttactgaagcagattgcgtgtttgattctttcgccacctttaccgcaaacggcaccgtagcgaagggtgatgccggggttatcaaaactggctacaaacacactggcgaatacaccaagaacgcagatggcaccgttctggtgaaagtgcaggtgcttcagggcgccgttgctccagcggctgcaactggcggcgctggcgtataaaataaggggcttcggccccatttttgcaccagaaaaaaacctttgacggcttaacgattcgtgatattcttcatctcgttaagccaaatacacaaacaggagtttttcagatgactatgaaattagatgcattcgaacagagtgcaattaaggtcgcaatgcagggcatgggcgtcgatgccgcaaaactggatgcttacggtatctggactgttaagcagatgactcaattactgaatcgccagtatgagcaggcatacccgcagaccagcgcacttgagcttttcccggtaactaccgagatctcgccgaccgcccgccgctttgagtggctcgaattcgacggcgtaacctctgcgaaaatcatcgccgattacaccgacgatctgccgaccgttgaagcgatggcaaaagagaagtcagggaaagttttccgcctgggtaacgcgtggtttatttccatcgacgaaattaaaactggtgcagcgctgggttcaagcctgagcgatcgaaaagcaaccctggcccgcgaaggtcatgagacgctcgtaaacgatctggtgttcaaaggctccactcctcacggtatcgtgagcattttcgaccagccgaacattaaccgcatgaccgccagtgctgcatggggcaatgattcagcggcggctgaaaaggcattcgaagatctggaagacctgcttaacatgatcgaagaaaccacgctgggccgccatcacgcgaccaacatcgtgattcctccgtctaagcgtcgtcttctgacgaaaaagatgccggacactagcggcgactcttatctgacttggttcaccaagaaccacccgaacatcaccattacggcgatggcggagttggaagatattgacggcgcaggcaccaaaggcgtgctggcatacgaaaaagacccaatgaacatgagcatcgagatccctgagcggttcaacatgctgccgatgcagccgaaagacctgcatttcaaagttccgtgcacctccaaatgcactggtctcatcgtgtaccgcccgctgactattgcgattctcaccgggatttaatcaaaagcgccttcgggcgcttttttattgcattgcattctgcaatgtgctttaatttgaaacctaaagtaaaccaatggagcattaacaatggccagtaaaaaagaaaccgtagaaaccgtagaaaccgcagaaatcaccagcgaagaacagacgccgcaggttgttcaactgcaaaacgttggtgcatgtgcaattcgctataaaggcacaaattacgtctatgagcaggttttcgaagtgccagaaagcgagatcgaccgattccgccacgaaatcttcaaaggccgcgtcgagttctacgacaatcctaaacgcacgcgcgaatacatcgcagcggtaaaggcgacagcgaaagagatcgtgcagcctaaaagcgcggaataacaaaaaccaacaaagggcgcttcggcgtcctttttcatatcaggagagcaaccatgaattacacaattcaagatgtgatcgataaaatgcgcagccttgcacctccgcttaaagaagttccagatgaactgctgtctgcatgggttgtgcttgccgaagaattcgtttgcaaatcccggttcggagactccatcgttacggcgatcgcgttgatgaccatgcatctaatgtttttggacggcgcaatgaagcaggaaggcgaaagcctggaatcttacacgcagcgagtggcgtcgttcaccctgaccggggagttttcccaaaccttcgatcgcgtgtcggcgtcaagtgataacgaaatgctttctacgccgtggggcaaaatgtactggcgtatgctcaagatgcgcggcggcggcttcggcctgcttaccgccgggaacgtgcgccgctgcggaatggttaggtgatcgctatgaactacaaagcaatccaggcacgcgcaagcgctggcattaaattcttcagcgacgctggcggcgtgttcaacaagtacacgaaaggcgctggcggaggaatcgatccggaaaccggggaagatatcattcctggcgaggtggtgacgacaatcaagggagcgatcagggatgttaatgaccgtgacattaacggcgaaaccatccttgctggcgataagcgcggttttttcactcatgatgtgccaatcatggaaggtgacgaaatcgaagtagacggagagcgctaccgcgtggttaatgcccgcccggtaaaaccaacgggaaccgtcgttgcctaccgtccagttttgcgcagggtggcgacttatggctaattacactatccgcgaattcacaggcgcaattgatgcgtggtgtaaggccgctggtgatgcgctggaggacgttgtaaggtttacgtgtgaagatattcaccgcgaccttgtaatgcgttctccggttgatacagggcgcttccgtggtaactggcaaatcacctttaaccgcgccccgctttacgcgattaacgcatacgaccaaactggcgaaaagacaatccagaacggcaaagccaacattgcactatacgcaaaaggggccgggatcacttcgatctggttcagtaacatgctaatctatgcgaacgcgctggaatacggccattcaaagcaggctcccaatggcgttatgggcgttgttgcgatccggttgggcgtttatgttactgaggcaatcaagcgagcgagggcgaaaaatgcattatgatatggcgttaaaatgcaaggcggcagtggctaaatttgccgccgagaacgggttgagggtcgcgggggataacgttgactttatcccaccgagaggcggggaaacctaccttaaagtctcctacgtcgaggcggattcaagatcggttgacctgtcaaggaaatgccgagtctatctggcgatggttcagattgacgttatctttaagcctggaatcggaaccgatcgagcgaggattatcgcccaacgcgttgcaaaatccttccctgaaggaaagattgttgatcgtgacggtaagttatatgtgagcgagtgggcggaggtacacggcgtgcagaagcacgaaacgggttggttcttcccggttcggttcacagtaagatgcgaccgcacggaggagagcggctatccatccaactagcggaacctcacgtcgcttataatttcttgccagcctggaaatatgtaggcataatggcggtgtaaaactttcattcaaacaggagtattcaacatgcatttaccaaacggtgctaaggtcttctttgagaaggctcgcggtgcgaagattccgtttaccgcaatgaccaacgacgcgaaaaacccaaaaatcacggtggcagatggcaagctgaaggtgaaagatattgtgatcttcaccgattgcacctgggacgacttcgttaacaaggtggctcgcgtaaaagcagtgacagcaggcgtggcaacgctggaagagttcgacacctccgacactaacaagtatcctggcggcgcggctactggtaacgtaagcgtgatcactgattgggtggaattgccttgcattcaggatttaggcaaagatggcaacgaacagcagttctataactatcagtgcttgagcgatgagcgcgaacaatccgaacctacttacaagtcggcagtgacgcttaactacacgtttgcgcacgattacagtaacgcgatctaccctgtgttgcgttcagccgacgccagcaagcaggcgagagcgatgtacatgtatatcccgcgagcttccgaggttcgttactggtctggaattgcatctttcgatgacattccttccacggctgttaacgagatggaaacggtaacgcttaacattgcgcttaaaggtgctcacgtcttccttccggttgccgtgtaattaaatggcggggcttgtgcctcgcctttttttgtgcataatagcgaataacacaaaccaatcaggagttaacaaaatggctaaattcaaaattcaaatcggcggcaatctcccttctttcaagctgcctgtaaccttcacttgccccgacggcaaagaagcaaccatcaccatgacagtaaaacatcgttcaaccgatgagatgaaagacttttatgagagcgaagataaagcgccaaagggtaacgccgagtttatccgcttcatggctgaaggttgggatctggatgacgaattcagcgatgaaaacatttcctggctttgcgctcacttcccggcgttcgtcatggcactgccacaaacttacatggccgcgctggcgggccaccgtgcaaaagtttaaggcgggctgtttatctcacgcttcagcctgagctaaccgatcgccagcttgcggagtacgggttaaggcgatcggattatgaagcagatcttgaaacgatctactttgatgaacagaccgcccaaagctggcagctattccaggccatgcaaacgcagtggcgaatcgggatgaatggcccgacggggcttgactataatacgttgcctatgctgttcgaattgtataaaatcgacaatcgagaagcggcattacttgacttgcaaatccttgagggtgaatacctgaaggagatttacaagaaatccaaataagcgcctactggcgcttttttcatatgggggcgaaacatggctgataaagtagctgggctaacgtttggcgttgacgtgtcgcaggttgataaagcggtacgatcactcgcagaactgaaaaaccaaagccagcaaacgggcgctggcctacagtcacttgctgacgctgaaaggcgggccacggcgcagaccgaggaaatgaaccgcgcattgcagcgccagaagcaagagactgacaaatcaaaaaccagctttagcaggatcgcaagcgccatcgatcccacgatcacaaaaatggccaacttgcgcaaagcgacggaagaacttgataaagcgtgggcgcttgggcttgttcctgacaaggaatttttccgcctgggagccatcattgaatccacaaccaacaatctacggcggcagcaggcggcgctaaccgaagaaggtcgcgcagcaatcgcagaggcggaggcaaagcagaaggcggcaaatgccgggcgtgattttgtcgccagcctgaaacagcaggctgactccatcggaaaaacacgcgccgaactgctggaaatgaaggcggcgcaattgggcgtatcggcagaagcggccccgttcattaacgcgctgaaacagcaagagcaggcgttaaagaaacagcaaaacgctatgggcctggctggcatttctgccgggcaatataaaatggccatgcgccagttaccgatgcagatcacggatattgtaacttcccttgcgtcaggtatgccagtctggctggttgcggtgcagcagggcgggcaaatcaaggacagcttcggaggcttgagcaatacgtttaaggtgttgttgagctacatcaacccgctaacggttggtgctgcgtcgttgggtatcgccctggcggcaatcgctaaagctggttatgactcctggagtgcgcaacgagaactggcgaatgcgctggtgctgactggtggctatgctgcgaccacaaccgggcagatcacagccttaaccgaagagattaacaaaaactcatcggccacgattggcagcattcaggaaatcgcaacatcgctcgccagttctggtaagtacaccatcaaccagattaagcagatcacgaagactacggcggaatggtcggcgcagacgggggagagcgagaagacgatcacagggtattttgatgccatcgtaaaagaccctgttaaggggcttgccgatctcaatgagcgttttaattttctgaaagagggccagctaacctacatcgaatctttgcgtaaaacaaaaggcgagacggcagcagcagatgcggcgacaaaactgtttgctgatactatggataagcgccttaaagatatcgcggacagtgcaacgccactcgaaacgatgtggatggatattaaaaaatgggcggctgactcgtggaagtgggtaggcgatcacacggtaggggcgctaaaccttatcgttgacacggtttccgcaatcatcaacacgatcagaaagctgattgccgacggcgacgccatgatcgcgcagttcatcgttgacgctggccgacagctacagaagatccccggcatgggagactttgggaatgactttctggcgcagcaggagcagttaatcaaggactcgaaagccaaatccgccgagcttgcaaaaaccattgcggaacagcaggcaaggatcgcaaaaggcgagatgggttacattgacgccgcgaaggataaaaccctttccggtgggtacagcagcaaaacgaaggatcgcgtaaatcaggaagaaaaagatatcctgaaaaaccgcaacgccaggaagcagcaggtagacgcgggcgttaaaattgatgagcagtatcaggctgaactgctatcgctacaggcgcagttaaaggttttgcagcagcacaaagggcttgatgacaagatcagccagcagcgcaaagactacttcgagacggttgctaaattccaggttttggaagaggcaagccagaagcgaaaactgacccaaagcgaacagcagatgctggcgaacaaaaagaatatcctgtacatggcggagcaaaaggccatcgtgggagatcagattgttcagcagcagagattgaacgccttgcttgacaagtcgaccaagtatcaaaaccagatggcggagaaaaccaaagcgctacaggataccgccggaatgggtagcaaggagcaggagagataccgggccaatgcgcaaatggcggctgactggaaaaacaacggcggatctttaagtgaccctggatttaaagcgatgcaggccgcaagcgataaattctacgcacagcaagatgcgcaaatgatgaactggaaggccgggttcactcatgcgtgggctgatattggcgacgaagttaatgacgtatacaccaacatcggggatatcactaaaaacacatttaacggcatggcgagcgtgctgactgattttgtaatgactggtaaagccagctttagcgactttgcaaagagcgtgatcactgacattaccaacatgcttatcaagatggcgctgtttaactcgctttctgccgcgtttggtggtggcggcacgttcagcttcgccaacatgttcagcaagggattttctggtggtggctacactggcgacggcgggaagtatgaaccaaaaggcgttgttcacggcggggaattcgtattcacgaaggaggctacgcaaaggttaggcccggaaaacctgtaccgactcatgcgcggctatgcaagtggcggcctggttggtggtaacgcaagttccggatctggaatcaccaacggcggcaacgtcgcagcgtcggcggctatggtgttcactatcggtgacattaacattacgatgggttccggtcaggatagtaaggggatggagcagggcgtaaggcagatcgtgaacgatatgttcaccgaggctttgagccaaaacgggcgcattgcgaagttcgtcaatgagaaaacgagggggtagtagtggattcctttaaatggtgtacacaaattcaaggaggggcggcaaaggtagccgtctccaacaacattcgatcgatcagtttcggaaacggctatatccaaacggcgtcgagcggcattaacaccaagcgccggacggttccgatcgtttatggcggttcagattgggaggaggtttataacttctgtcaggatcacgtaaccaagccgtttgtgtggaaggcacctgatggaagaatgggcgtattcgtcgtaactgccgactccgttaaccttgcgccgcatggtggcggcgtgtttgaggtaactgcggagttcgccgaacgcttcacttcagccggataatcaaaagcgccctttacgggtgcttttttttggcctatgatctggagtcaattagaggagggcttacgatgacagccaacatttcaaaagagtttacgaactgcttacaaaaacttttccccggcgagatcctgacgctgatcgatatcgacgccacaaagttcggcgggcaggtctaccgattccataacgagaacgtcgcctatacaaccgaggagcttttagcggcggtgaacggcgggacgcttcagccaaaaatgatcacgtttcgcggcgagcaatacggcccgcgcccgttcggcctgggcgggatcgcaatgtcgagcgatggcacagtggaaaagccaacgttgacggttagcaatattgatgcgcaggcgagtgctcttattcgcgcctacaacggcctcatgcaagccaaagttacggtatgggttttggtcaatgaattgctgcaaaacgacggcagtgttaaagagggcgattttaggcgatttgtttactacatcgagcgaccaaagcaagtagacccgcaaaaggcaacgttcgaattaacatccgtgtttgatatggacggattgatgatcccggcccgactgacgcaaaccgtttgctattgggcgcagcgcggctggtataaatccggcaagggctgcgactacaacgggcagaacggatacttcgacaagttaggaaacagggttgacgacccgtcgcgggatgtttgcggtggcctggtgtcttcttgcaggcttcgttttggcaatgaaccgttgagtttcggcggttgtgcgacagcaactttgaagagtggtagctaatatgttgactccgaaaattaaaatgcagatcatgcagcacgcgaaggaagtctacccgcacgaatgcgccgggctggtaacgcaaaaatcacgcgtgcaaaaatatcaccgactagacaatgtttctcaagatcctgagaacgaatcaatgccggacgaaacgcagtatgcgatggcgtcaatggagggggagccgatcgccttcgttcattcccatactggcgacggggcgaccacgattccgagtgccacagatttatgcttttgcgatgagtctggattgtcgtgggttatcgtctccatcccggaaggtgatatgcgaatcattgagccgaaacgccgacctctgattggtcgcccctgggctttgggcgcttacgattgctatggcctaatcatggattttcacaagcgccacggcgtcacgctaaaagatcggcgattgccgttcgaatggtggaagccggaatacaaagagaatctttaccaggattactggcaagaggacggattcattgaaaacactggcgagcctgaagttggcgatatgatcatcttccagattcaggcggaaaagtggaatcacgcgggtatttacgttggaaacaataacatccttcatcacgcgtttggcaagctgtctcgccgggatatctattctggatggtacgagcagcacaaggttttaatttgcaggcacaaggagcttaaacatggcatcacatacaaagacgattaaactttctggttcccttgggcgtaggttcggagtattccacaaacttgcggttgattcggttgctgaatgtatccgggcgctgtcttaccaggttgaggggtttaagcctttcatgcagagcaaggttggtttaaatatgcgcttcggcgttgtcgccgacggaaaaccaatcagcgcgaacgaccttgcgacttttgccgtggcgagggagattagaatcatcccgatcccaaaagccagaaagaacggcgggttgttgcaggtcgttatcggagcggcgattatggttgcggccttctttactggcggcggctcgctggcggctatgggcgctttttcgtcggcagcattcatggctggcggatcgatggttttaggtggcgtaatgcagatgatcgcaccgcagatgggcggcaacatgcgggcgagcgaatcgcctgagaataagccatcgtatgcgttcggcgggccgattaataccacggcggccgggtatccaatccagttgccatacggttacagattggctggaggcgcattgttcggttcgggatcttacgcagaagacaacaactaattaagccattcgctttttagcctgggggcgtagcctccgggctttttgtcgtgtacaattgcgatactattaacaggaggctaaacgatgactaatatcaaggcccgcaagggcggttcaagcaagccacgcactcccgtagaaatgccagataacctgatctcaaaagataagatcaagttattgcttgctgtttcggatggcgaggtggttaacgacttcagcctgaagcagttgcattttggaggcgtcccggttcagaacgaggatggaacattcaactatgagggcgtgattgcagagttccgccccggcacgcaaacgcaggactacattcagggcttcagcgaatcaagcgctgaattccaggttgctcgtgaagtcactcacaacacgccttatacgcttaccgtatcgaacaaaaatctttctgccattcgctttcgcctgttatggccgcgcgtgctgactcaaaaagataacggcgatatggtcggatcggttgttgagtacaagatcgagatggcggtagacggcgcaagttatcagacctacctaactggcaaaattgacggaaagaacacgactggcggttacgatcggagcattcgcgttaaccttccgcaaaacttcacgtcgcaggtgcttatccgtgttagccgagtaactccggacgctgacggggtgaaggttgtcgatgcgttccaggttcaatcatacgctgaggtcattgatgcaaaattccgctacccgttaacggccatgctttacgttgagttcgatagcgatctgttccagaaccagatcccaaccatctcactcaaaaagaaatggaaaattattcaggttccgagtaattacgatccgattaatcgcacatactccgggacgtgggacggtgtttttaagtgggcgtggagcaataacccggcatgggtgctttatgacctgatcatgaatcagcgctatggtttagaccagcgcgaacttggcatcccggttgacaagtggtcgctgtatgaggtggcgcaatactgtgatgaacttgttcctgataatcgcggcgggatggaaccgcgctatttgatggatgtaattgttcagtcgcaggttgaggcgttccagttggtaagggatatttgttccgcgttccgtggaatgacgttctacaacggtgaaagcctatcgattatcgtcgataagccgcgcgatccggtgtacctgtttacggctgataacgtcgttgacggcgttttcgttcggacgttcccaagcgaaaagacgatgtacacgtcgtgcaacgtcatgttcgacgacgaagaaaaccagtacgagcaggatgttgaaccagtattcaacccggacgcagccatgcggttcggacacaacccgaccagcattacagcgatcggatgcaccagaaggacggaggcgaaccgccgtgggcgttggattctgcaaacgaacctaagcgccacaaccgtttcgttttctactggtctggaaggtatgattccttcttgcggcgatgtgatttacgttgcagatccgcactggcaatctgcctttaacctggtgctttcagggcgaatcatggaagtatccggtacgcaggtatttttggcgttccgctgcgacgcgaaggctggcgacactctgatcctgaataccgacgacggcaagcctgtgcgccgcacaatcgccagcgtttcggcggacggtaagaccctcacgctaaacgttgggtataactttgacgttgcgccggacagtgtattcctgatcgagagcgatcagcttgcagcggaacagtatgtagtaacccggattgaaaagggtagtgatgacgacgaattcacctttgccatcactgctacgcagtacgatccgaacaagtatgacgcgatcgacaatggggtaattaccgatggccgaccaacttcggttgtcgacccggattcaatgggcgctccgaaagacttaacgattagctcattttctcgcattgttcagggaatgagcgtcgaaacgatggtgatcggctggtctgccgtgcagtatgcaaaactgtacgaggtgcaatggcgcaaggatggcggtaactggaacaacgtcccgcgcaccgcgacaacgcaggttgatattgaaggcatctatgctggcgagtatcaggcccgcgttaggtgcattggcggcgggaatgtagcgtctccgtggtctgctttggctagtgcatcgctgaccgggaaagtcggagcgccaaaaggcccgattaacctttttgcatctgacaacgagatcttcggcattcgcgttaagtgggccatgccagaaggggcggaagacacggcatacattgagctttaccagtcgcaaagcggaaccgatcaggacgcaagcctgcttactctgattccttacccggcggctgaatactggcactcaattttgcccgctggctacgtgaacttctacaaagccagaagcgtagaccggatcggcaatgtttcagaatggactgattacgctcgcggcatgtcgtcgactgacgttaacatcatcacagatgcgatcctggatgaaatcctggatagcgacgcgatgaaggaactacaggaaaacgcacaggatagcgcggcaaaactcaatgactacgcgaacagcatcattcaaaatgcgctggcgaatgatgcggacgttaggaaaatgacgaaggagaacggtaagcgtaaggcagagatcgcgcataccacggtgctgattgccaacgaatcagaagcgagggcggctgaaattacgcaacttaaagcgcagattgatgaagatatcacgtcgcagattacgatccttaacgaagccctggcgacggaaagcgagacgagagcaacgcagattggtcagttgcaggcagattttgcggctgatattgacggcgtaaaaacaacaatgaacgctggttttacgcaggttaatcaggctattgcaaatgaaagtgacgcgcgtgcaagttccgaggcggcactagatgccaaaatcgggcagaactccgcagcgctaaaccagaaactcgactcgtgggcgaacgttaatggcgtcggttccatgtacacgatgaagttgggcttgaggtacaacggtcaggagtatagctccgggatggccctacagcttacctcaagtggtggaagcgttgtttcgcaggtgctgttcattgctgatagatttgctatcatccgtaatgcggcgtctggcgcgtacacgctaccgtttgttgtgcagaatgaccaagtgttcatgaataacgcgcttattcaggacggttcgattaccaacgcgaagatcggtaacgtcattcagtccaacaactttcaggagaatgttgcaggatggaggcttgataaaaacggcgtatttgtcaactatggctcaacttctggcgaaggttccatcaagcaaacgaaccagaacatcactgttcgagatggtagcgggcgcgttcgttgccagttgggtaggatcactggatcatggtaaaattaatgccgggagaaatcccggcttaaccaaaggaggcagacaatggcttatggttttcaatcatgggatgcgaacgggaaccccaacaactatgggatcgtccctgtttcagttgctggatatattgcattagcgcaaggccagaaaagcggaacgtggtattacaacgtcccgcctgggttgaggcttggtttcttttgggtcgcaaatcaagaccagtacggcacatcgaagaggcgaattaccgttagtggtaatcagatcgttgtttcagatgcgccagatgatgcgctggaatcaggcgtctacccggcgacgcaaggttttattgtcgttcaaattatgagttgatgattatggcagattacggaattttacttaccaatgatagcggcaatgtttgggtttcgcctcaaagcatcccactggcactactatcaaagcagagcatcactcttaggggtggtactaactccgatgaagtaagatcggtaacttacgacacgaatcacccatgcgttccgttcgtggtctttcatggatcttcgccacaaggtgcattcacaaaaatcaagtacagcggaaacacttgcagcgttgttttttcttttggtaagcaaaacgtatatgcggaggtttattttttctccgtgttcccacagccaaatcctggttatgggcttgcaatttgggatgaaaacggcacgctgattttgaccaatgaaaccagaacactttcagacgtacagacctacggcactggttttaatctaaacgtcactaacggcgggaagtgggcggttagtcctgttcagttaggcgcgatcgttggtgttgttcgcgatccctacccaagaccatttcagggcgactattgcgcagcggcattctttaacggctcaagcacgcaacttaccgcatatctaacgcaggcaccaggaggagccgccagcgatctaacctacgtcaatatgaaaaacacctgcatcgctattgattgcgcaagatacgactaaaagaaaggggccatacggcccctttttctaccccttgagatttttgatctcctcttttaattcatcaacttgagcagacagagctttgattgcgcaaattgcatccatcaaaagagcattattgtcaagcacaagtttcttattttcaactacgttaccctcatcatcctgataggatgcgctgctttctttaacgtagcacgaatcgatatctcgcacctgctgtgcaataactcccctacgctcgcgtttcttaacatcatccttataggtgaacttgaccagattcattgctttgatgttttcgagtgactgcaaaccatcataagcaacaacattgtctttgtagttaatgtcagatagaccagcaaaaacaacgttgccataagcagtgcttgcaatattaccatctgatttaaactgccaatactgcgtattaccgccagttccccatttgctgacctcaataacggcacgatgttcataacccctatgttcctcaagccacatagcgcaacgcgcaccgttaccattaatgttgaaccgtgagataaatgatggagatttaaggatatcaccattattcccatttggatcgctagttggccacgctacaaaagcatcattaacggtactcctcacagtcccatatgacacaacacttccgcgaagatcggcagccccgccaactcgcaacgtgctcgacattgtaacagcgccgcgaagatcggcagccccgtcagcacgcaacgtgcttgacattgtaacagcattgctaaagtttgcattcaacccggtaacagcaaagttcgatgcatcaaaaacaacctgcttcgcgctgttcatatctccattagggcggaagtacattccttgaccattttcagggattgagtacacgatcgcattgctgttatttgccctaatagtgcaaccgttcagggtcagcgtggcgtttcctccaggaacgctaattgcctgcggctggctgaacgtgttagctacgttggtgcgcgggatcgtattatcattagccatcaaatagtcagacggtgaattatatacaattccagaaggctccgtgtcaatccaggtataaccagtgcgatcaatgattggccccgtaatcgaccctttgttagcctgtacgtttacatgattcaaccacagttcaggaacccatccgccgggagcatgaatataaacatcaaacgaggagtctgtgtttttcaccaccccaagattaatgcgtctggtgtcgtttggtctggcagcaatcagggtgcgctgagtaaaccaagtgtcaatattattactggttagcgtatcgggaagaccgcggccagaaatcgaaaagatatcaaccgggagatttgcagtgccataaccagtacctccgccaatgatgaactgagcaaatgcgtagccatcaccagcgttcttgacgttggcgatcttcatccacttctccccagcgaaagtgccagtaattttatccggcacctggacgccagccacaaggtcgacaacctgatcacgaagattttgcgtctgccccttcgcagtttgcgcgtcgttcttcgccgagttggccgcagtttctgacgcttttgcattggtctccgaggttttggctgcggtttctgatgcctttgcattggtctccgagtttttggccgcagtttctgacgctttggcgttggtctctgaggtcttcgctgcggtttctgatgcctttgcgttagtctccgacgtcttcgcagcattcttggatgcagcagcattggtctctgaagtctttgcagcggtttctgatgcctttgcattggtctccgaggttttggccttattctccgaagatttagcgttcgtctctgaggtcttcgctgcggtttctgacgctttggcgttggtctctgaagtttttgcagcgctttcagacgcagccgcagccgtagcgcttgcgcccgcagcttcggaatctgccctcacctgatcggcaagactttgcagagcttcgaaatcgaagttcttaaagaagtcgacagcatccgcaatttgagtttcctgtgactggtagtagcgcagagtttccgcaacatcttgcgccagtccgtcaacggtcagcgagtcacttaacaggatcgcgtaatcgctagacgctacgacagcgccttttgtggtgatggctttaatttcagtatcgctaaccaccttgtttacgacggccatttgaattggtgacgacaaaaacataatcgtcgcaccagggcgaatcagcgaaagcgatgattgccattttgtgccagtcccggtaacggttccgtctgcggccatagccgctttgccttctctgtatagtgccatgtttttaagcctcattggttgattgagtaacgcagataatagcatcaatgaaccgataaaaaaaggagcctttcggctcctttagttgtcaaattagaacgggatatcatcatcgaaatccatccccgcattcccgccgctgttttgcggcttaggcgcttgttgcggcttgggttgttgaggctggccccacccggattgctgattgccgccgccgctttgcgaaggatcgcgctggctgaattcgagttgcggcataatcatttcgttgtggctgtaaattgtgccgttgtgctcgcggttaacgatctgaagcgtccggcaggttacgctgatcaccttatccatttgcagcgcttcgtcgtaccacttaatcatgttttcttttgcaaagaaaactgcgcggtagttcgtgtaaattgtttcgtcctcgccatcacgattgcggatcttcatccgctccgacaggtctacggcgtacattttccacggcccgttattgttgctgccctctttgacataaggcgcttttcggattacccctgttacaacatgcattgtcattcctatggggcggcttcccgcccgttaaattagttgaaagatgaaatatcttgcgcttctggttcaggttttgattctaccttttccggctcgcgcttcgcaacctcttgcggtttaccggggttaaatccgtttgccggggtgactttcagttctgcctggcgtttggtgatatcgtcttccgtcattttccactccgccggggttaacgtttgtttcgccagcttatagatctcacgaagcgattcgagatcttcgcacgcgtcaatgcgttttttgaagtctttcggtgtcattttcgtaatttctgcatcatcatccgcctgcttgatacctagcgctgcggccagcgcataacggcgggcgtaagatgttgttgagccgtatgcttgttcgacggttttactgatcggcatattgtactgaaacgccatgaactcgccgctttcatgcaaaaacatagtttcgaggtgcatcaccttttcggtgctcgtatccatcatggattgaatgaccataattttgttcttctccagcgccggggaaatagcgtcgaggatatccccaagattcgcataggtgttcccaagatggttgttcttaccgcttttctttgcggccacgaagccagattttgccttgattaatgcggctgcgatggtggtaaatttttcagatgtacgcatgataaagtttccttttcctaattggtaatgcgcactatatcacaagtgcgcaccagtgtttagctatttgtgccgtatacgtccgggaacatgtatttcacaaactgaggagtcggcaaaacaacttccgccgcgtttgactcatatgatggccatgaatcgtgcttcacgcattcagcatactgatgaatcacgctttgatactgtttgcgaccgatctcgatctgctggctggtcagggtgaacgccagcggagcaaacggtgattttttctcctgcgttagcagtctgacaactaccgggcgtttttcgttgtaagtcttcacgaacagatcgcgctgcaatgccatcttgagatagtagcccaagttgaaggcgagtcgcccgaaatcgtcaggcttggaagattgcgtggttttgtagtcggtaatcaccacgacctcgaaaacctcatccgggttgaacccccactccttgatgagttcgggatcggaaacaacgtcaacatgatcgagtcgaaccttaaccttgacgccgaagatctcaccgaagattgacaattcacgctgtgctgtaggcgattcgatacatgcggcgtgtcgcgggttagccagcatcacgctgcgcatttgaacaacggcatcgaaatcaacatccttaaccagcttgcgcccggagtttatcgcggcgctttcgtcgcacagttcaatagcccaccaaacatttacgtcaatcccggcgcgatatgccatttccagaagttccgggtaatccttgttggacgtcccaatcaggccacacgctttcagcttcgcagacagtgccgacttcgacgtaatcagatctttaacctcgcccggagaagtcgcccgcaggtactcgccattaaactttgccgtctcaagcatacaggtatgcgaacaggttccgaacgccagcgcggctgcttcctcacgcactttgaatttccagtgcgccggggatgttgcgtaaatctcgccgaggcttgagccgctaacgtattccgcgcaccaggagttaggatcgtggtaatcatcgttggataattccgcgttggtgtatgccttaaaaattgcttcagccattggtatcactccatttgtggtttcgttgcgttaagtatacgcatgacgattccaggcgcaagtcaaaaagtgctatccgcagttggttaaaaaacgagcgaaatttacgtaagatttagtaagatgcatcttacgtgatttttcctatatatttcatttagttaatgcaaatcggtaagatggtaatatccctataggtaaatatccatgaaaaatatggcgcgaaatccagcgaaaaaagacacgcaccccggagaaatcttaccaagattgatagatacagatagagtaataataataatattgttatttatcatatacttactatctatatattgcggttaattggttaaattttgcgcgaaatttacgtaagattcatcttactaaatcttacctaaagtggttcgaccagctgcaagccactgaatttcaggcataaaaaaaggtaagactgatttgctcaatcttacctaaattctggtcaacatttaatcatagaagcgacgatgccctgtacaacttgcgttcaaatccgagcttaaagttgtcaccgttcggaacgataactttaagatcccgatcgtcagcagccgccagcatatcccgatctccacgacggcaaactacccgcatttctcgcttaccttctccgccattgcctttatacctgtacgccacgatctcgacgtttgaaggtatgatgcaggcccaaacgtcgcacttgaacgaactggcaatattaaagtgcatcgcctcaatccaggatcgagcaaggtaaatcggcccgttaccgtcgtcgctctgattggtcactatcaccgatccgaatgtcagatcgccagccaacatcttctcccgaccctcctcatcaatgaacagcatgttgcaatactcatcatccggcccatcctcatgcactagttgcattggtagcgcgtgaattagctcctgtctgcagttctcgtgagtttttacgccaaccagatatgatttgatatgctcattttcaatgccctcatagagcgttacaggcgtgctatcgacggcctccgttctgtttaaaactgccatcactctttcatgatctgccatctttccgtagtcatacccgttatcacgagctacctgcttgtttctcttgactacgtattcttgcggaacctttccgagatagcgcccaagaatgttgatgcactcgctatacggctggccgcttaacttcattaaccagccgatccccttatcggcaccgcaaccgccacagtatgcgccgccatcacctcgcgtttccagcttgtcagtccagcggaatcggtctttgccgccgcagttcgggcagtcctggtgcttgccgttgaagtatcgagagtggatgccgcaaatgttctgcaacgcctcgcgccacatgccagccatgtacggcaaaacctctttttcatcgtaaaaatccacgtcgtaacccccaaataaaaaacgcctacacgagaatgataacccggcaggcgtttagtgtttagtcaaattgtgctatcggactacgcggagcatttcgcggcggtcgcatcggcgcgtcactggcttgccgttgctgtcaaatcttaaatcaggtcggcagaatgaggcgcgaaaacctttgcaattgttccgtcggtagctcttatgtactagataagcgccatcggctgagatcataccgcgcttacgccactgctgaacaacctggatactaactcccaactcttttgccgttccagcgataccaccgaaggcatcaataaccagctccatccgcgcagtcaacccagctcgaacctcatccttcagcacgtagtaaccagtcggtcgcttgcgtttcttcttatctttcccgcgcgacgttccgttgttgccgttcaaggttcgcttatcaaccattgccatttgctccataattcaaccctcatagcattttttgttaaacctgataaaatgttccatgtattatacacgcaactatgcgaatgacaaattaggattgacaatggcaagcacagaagaagacgtagcatattttaagcgactatttcgttatgaaggcggaacactgattcgcaaagttacaaccagtagtcgtgcattcgctggagactccgtagggtgcgagaacaacgttgggtatttacaggtaagcgtaaaaagcaaacccctatacgttcaccgaatcatttgggaaatgcataatgggcctatcccagaaggaatggagatagatcacatcaaccaggtcagaacagataacagaatcgaaaacctgcgactggtaagccaccaagtaaaccttaaaaaccaatcgatgaacagtggcaatactagcgggcacgctggcgtaagctggtttaagcgaggcggtaagtggagggcaacaataaaggttggcggaaggcaaatacacattggttacttcgcgtcgtttgagtcggcagttgccgcacgaaaagcagcagaaaaacaatatggttttcatgataaccacggagcagagaaaaagaaatgagcttatcgattgagcaacaaatagatctatacgcagacaaaatcccggcaatccaaaagagatttaccgttggaaatatcgttccgtatccatatcaggctgtggcttatattgagacagccaaaagaatagcaaactacaccgcaccgttttacattaaggcttcggtttccgccgggaaaaccatcatgatcgccatgctcgcagcgcagtgcaaggcaatgaacttacccatgatggttcttgctcgccaggccgagatcgtgaagcaggattccgaggagatcagtaacctcgacgttccaaactccgtttattgtgccgggttaggcacgaaggcggcatacttcccgatcgtcgtcggatctgaagggacggtggttaatggcctgtttaaaatgctgggcgactacgtgccttcagttctggctattgacgaatgccaccaggttgactggcaagatctggcggaagcgatcgccaacaatgaatcgttcgagtacatgagccgaccgaaggataagccgtatcgcgtgaacggggaactggtcgatgccgaccacccatacgacgaaaaattcgacgacgtagaattcggcggcggtcgcacgcagtacactatcgtcatttgtgagttaatgcggaggtgccttgagaagacagggcgagaacttcgcatcgttggctatactggttcggagtttcgcggcgtcattccgattttacaggaagacaagagccagcctggtttttggcgcgagcagatcaccgacattaacacaaactatcttgtcgagttcggatcggtggttccgacaatttttggtgatactgaatccgaagggttagggtatgacctatcagaattccacggttccagtcaggacggtacgcaggattttagcgcggaagaattgcgcaagatggaaaagaaaatccatgaatccggcgaaatgacgaagctgattatgcaaaaggtcgtggagcgtgcgaaaacccgaaacggagttctgataacttgcgctggacagcggcattgcaaggaggcggcgagctatctaccgccggacgcaacatacgcgatcatcaccgaaaagacgaactcaaagaaacgcggcgaaattttggataaggcgaatcgcggtgagatcaaatacatcttccaggtgatggccctaaccactggcgttaacgttccattttgggatttttctgtgatattgcgcaagatcgggtcgcttacgttgcttattcagcttttggggcgcggaatgcgacttctgaaggactggcaaaaacagccgccttactcgtgggtgaaagaagatcaccttgtctgggattttgccggaacaatggatgacctgggccagttgtatttcgatccgatcttggagcaggcgcaataccaaagacgcaagagcagcaagaacggcccgaaaatttgcccggtatgcaagggggaaaatagcgagtacgcccgcagatgcattcacaaagacagtaacggcaatcggtgcgaatacttctggatctcgcagaggtgcgaagaccagaaagacccgcgaacagggaagattaaaatcaaggggtgttacgctgaaaatgatattgttgcccgccaatgcagatgctgcggcgttcagcttaaagaccccaatgacaatctcaccgggaagcactatacgcagaatgactggtatgatgttgtctggttcgatatcggcttgactcgcaatcagtccgggatcatcttcaattacgtgttactgaaccatgacggcgagcgattcaccgcaagggaaaagttcttcccggaatcagagaatcagatttgcggcaagctgtggcggcaaaaggcagtcttccagcacgttagcgacgcggtaatgcgtggcaagttgggcggaatgaaaaacgcccgcaagatcctggagtatgcggaatacttccgcgcgccgaagcgcgtaacgcatcgcatcaacggcaagaaggaggacattatttcccgcaaagactttggaggcgaggagtgattacagacaaaggggattacctcgaatattacggcgggcctgtaaaggcttgcccacttgaaaaaatcgaccagatgaacagcgtttcgtggctgcgttacgaataccccgattatctgttctggcatacggttaacgagggtagcaagcacaaggcgagcgccgttgcagatcatcaaatgggattgcttaaaggcgtaagcgatatccttgtgctgattgggctgggcggaaaatacccgttcgccgccattgagctaaagcgccagggtaaatcccaggcatcgccagtgagcaaggagcaacgggaattcctcgccgccgtccgaagccgtggcgggttcgctgccgtggcctatggattcgagcagtttaagatcgcgtttgaagacgcaatcaaatagcactttttgttaaaactacccggcgcgagtcgggtattattctcccatcgaaacgaagaacggagtatttaaaatgaaaaagattattgctttaattgttctatctcttgttctcattggttgtagcgaaaaaccaaaaacatatatttgcggtaatgaatcgtttgaagttactagcgactatattaaggtggttcgcggtaatagcgctggcgttttaattgatggcattggtgaaaaccagtataagctggttacaccacttggaacggctttttatactgttaataaaaacaccattgatattaaagttagcgtttatcagaacactttaacttgcgaggttaagtaataatggcaaaagatatcacagacaaagacactcacgacgcgttcacgactttcgaacagcttgagcgtgaaacgttcataggcaacgcgcttgccactggcggacactatcaggccgtcaagcctgataaattctaccaggtaacgggcaaccgctacgccgggagcaagacgccggatatcgtccgcgacaagtggtcaaccgatcgcagccttattgcttacatggaggagcgttacgggccatacgacctggacgccgccgccgaagaaagcaacaccgtctgccctaagttttacgacgaaaagaccgattgcctcaagcgctggtgggggaaaaataagcacgtatggcttaatccgccttactcgttcccggatccctttgtgctgaaagccattgagcagatggagcatgacaaccagatcgatattttgcttcccggcgacaactctactgcgtggttccgcgacgcacagaaggcagcggctgagatcatttggattgtcgcagacgtcacggaggacgaagacggaacgcaactaagccgatccggtcgcctagccttcatcaacggcctaagcgggaaaccagtcgacaacaacaataagggaagtgttattttcatcatgcgcaagctcaagccgggagaggagcaaaagacactttacattccggtaagcgagatttgcccgtcattagctaaaaagcgtatgcgcaaacgtgggatctgaaaaatggaacagacagagtctttcgccgagtatcttcggatcgttgttgaacttctggacaagcacggcttcattgggacggatgaggaaaagttagcctttgctgacaccatcgacggaacctacatggagttcatggacaacggaaccccggtcgctgactggccagaaattcttgaacgagaattgattgagtttaaatcacatgaaggcgcggagtatttcgcaaaacagcactaattgctaaacaatacccgccgcgtgcgggtattattactccaccaaccaatcaggagcaaacgccatgaaaaccaaaaccattgcagacaccatcaagatcgtaccagtaaaagcgcaagtggtatcgcgtcaactggttaacctgtctcgcctgtgcatggccgactacatggcgaacccttcagataattgccttgatggtgtagtcggtgagatttattttcgcgctggttatggactggaaagcgtggccatgtatgagcaaatggccgaaggtttttgcatttacggtgacgaatgatgattgtcgagactggtcgcgctgccgtatggcagcacgcaaaagaagcgggaataagtgatgatatcgtgaagatctcaaagtatttcgatatcaaagatatatcaattatctttggtgggaagctcacctatctaaacgagcgcccggtgaagcgcacgcgaatagcagtggcaacgcgtgcggaggccgacgcgctgaagatgttcatacatgagtcgaaacagcagaaaaaatattacaagtagcgggggcgtgaagaatgcgatatattgcgatcctatttacggcgatcctgttcacgatcgcaatcatgaactgcgcaattcaattaggataaattatgttaccgaaaatcacagacgaagaattcttagccgcccgcgaggaaggtaagacctaccgcgagatcgcggaagagttcggcatgaacattcgaagcgttgaacgtcgtggcgttcgcctggcacgacaaggacacctacacggaaacgcccacgtttcgaagcatatcccggacggcttcggcgtcaaaggcacgtcgacgatgattcgcgcggacggctccgaggtcgttcggtgggtcaagtcggaagtagacagagatcgcatggtcgcgcttatggaggcggcgcaggcggctttctgcgaagaccttccgcgagctgaaccgcaaccgctggatgagtcgaagttctacattgaagatcagcttgccctgtacccaatcttcgacctgcatattggggctatggcgcataagcatgaatgcggcgagaactatgataccagcacggcagagaaggttctaaaccgcttctttgattattccgtgtcggtggctccgcaatccaaaaaggctgttttgctggttggcggtgacttccttcacagcgacggcctggacgcagtaaccccggcaagtggtcacgttctcgatcaggacagccgatacgcaaaacttgtttatgttgccatccgctcgctgcgtcgcgccgtgtcgctactgcttaacaatcatgccgaagttgaagtgcaggtaatcgaaggcaaccacgaccaggccgggatgatttggctacgcgcagcgctggcggcgttctatgagaatgaaccgcgcgtttttgttgatgttagccctgcgatcctgcatcgcaccttgtggggcaaaaccatgctgggctacacgcatggccacacgatgaagaagcctgaaacgcgccttgctgcgatggctaccgacttccgcaaggagttcggccagtgcgactacatttacacgcattccggccactggcatcaccagactgtaacggaacactcgttaggtattgacgaggtgcatggccagttaggggccaaagacgcttacgccgctcgcggtggttggcgctcctatcgccaggcggcggttattctgtacagcaaagaatatggcgaagtaggccgctttatctaccgcccgaacatgtaaccacaacggccccgcgaggggccaacaaggaaaaccgatgaatagaaatatctgcattttcgatctcgatggcacgttgtccaatggcaaccaccgcttgcacctgctgccgaaaaaggatctccaccttacagaaagttggagtgaatttaatggtgcatcaattggcgacagcccaatccaaagcacaattgatgtagcgaatgcgcttcatcgctccgggatgattgtcgttatcctgaccgggcgatccgatgaggtgaagaccgaaacaatgatttggcttgaccgttacggggtgaaatatgacaggctcatcatgcgtcgcgccagcgacaaccgtaaagacacggtaatcaaggaggaggagttacgcaaaatcggaattgatcgcattgttgcggcatgggatgattcacccaatgttattgcgcacttgcgcggcctgggtattacgacttaccaggtctgcgactacggagacaatcttcaagatcatttaaaatcgcacggagtagacaaatgaaaaatgtaattattctcaacggagcacccggaatcggaaaagataccatcgcggaaattatctcgcggaagtgggaatacaagaaccttagcttcaaacagcctatgtttgccatcgcgcgtgctgtgcttggatctactgattttgcacgctttaccgccagataccacgaccgcaagcacaaagaagtgaaatgcgattttttgggcgaccgttctccgcgtgaattcatgattcacattagcgaaaacttcgtcaagccgaccctgggcaaaaatcagttcggcaagttgctttgcgattcagcgctaacttcgccgtttaactgcatcgtcagcgacggcggttttgatgaggaggtcgagcacgtcgcagcgcatgaggcgcttaacgtatttgtcgtccgccttcatcgtgacggcatgacctttgagggtgatagccgcaaacacattcgacgacccgatctgatttgtgacacgtatcacgaacttgattttgatatgaccactggcgagcctgaagacgacgcgcaaaaaatccttgatatggtttcagatgttgcattaaaattataaagttaatgcctttattatcaccaccttaacgattgggaaccttgacgggttcccttttttttgttcttaattttgccaaatgaatatatcatcaccttaccatttaactaacagaggttgcatatcatgcgggaattcatcaacgcggcaaccaatagcagcggcggtgttgcccttgcgggatctgcatccgggcaattaatcattgctgccattggtttatttttcatgatcttatttggctcaatcggcacgtggctgaagtggaaagactcaaaagccatccgggaggcgattgattctggcgacattaaagaggcattgaggatcaggagcaaataaaatgggaatgaaaacgcggcttactttcgcggcggcggtggcgatcgcggtcgcgttcctccccgaagtggaggacactaaatacacggtttatacggatatcgctggcgtaccaactgtatgcgaaggaatcacaggcccggacgttatcaaggggaaaacctatacccggtcagagtgcgacgcgcttttaaccaagcatatccaggtagcaaagcgaaccgttgacagcaaaatcaaagtagatgttcctgacaccttcagggcgtcgatgtacagcttcacgttcaacgctggcggcggcgcatattctggcagcaccatgctgaaattaacgaaccagggccgattgcgcgaggcgtgcgagcagctatatcgctggacgtactaccgcaacccgaaaacgggtaagatggagaagtcaaaaggcttgcataatcgccgggttcaggaatatcaactatgcattaaggatctaaaatgattaaggtaattggtgtggctcttacggttgttcttctgtctggttgcgcttccagtgtcccgatcctttccgatctggtgggcagcaagccggatatgacggcgcaagtaggcgcggagaacgttaaacaggcggttggcgtgacgaacaaaacggacacgtcaagcaagcaggagactacgttcaaagagtcggcggtaggaaaggttgacacgtcgaacaaaaaatccgtaacgacctccagcattcacgccaaccagatcacggcggacaagatcgagatccgaaacgatgaaagcggaagcctgactccgtggctgattggtggtgttggggttgtaatgctggcgataggtgcgttcggtctttggcgggaacgaaaaaacaaaggggcgtaatgcccctttttctatatgtaccgcttgacgtgcaatagcgctactccgtcttcatcgttaagaccatgttcaaccgtgttggttgcagccattccttgatagagcaagatgagcgcggcacgcaagtaattttctggtgtgatctgtttcacacaaacaagcctgtgaacttccgttatcagatcttccacctggtttcccgaaaagctgttcatcactgagttggtcaaggtgcatcatctcccatatgtatcggttatccatcccttcgaacgaccggaaatcaaaacctatttccctgttatccggccccgtacaccacacagagccgttttttccgtcaaggtatccattcgtatagcttcgcgctaaaaactccttagagaccattgaggcgaacatacgttgcgatacgttggcggcttttgccagtcgaggcgcttcgcggtgcgtatagacgaacttcgcaaaatcctgccgggtgaactcccggcgagattcgcagaacttgtaaatgtcaagaataaacatcaattacctcatgaacgacgggttgataaagacttcggaatccatcacgcagataaagcctaattcctccatcttcggcaataagcgttccttaatctttttgctcaccccggcctggcctttgaagatcttcaggttgcggcaggcgttataaatgccctggacggtcataacaccttttgcctgtttgcagcgactggcgataacgtcatacatcgctttaatttccgctccctcaccagcaaagccggaagagtcagccgacgacaaatacgttttgctcaattcatggaacataatgatcgcttcgtcaatggtcgccgtgtcgatcttcttcgagcgcttcccgccgggttgccagttccggatcgtgtgaatcacggacgccagacgcataacctgcttatcaaacttacccatcgcgccgcgaagcattgtatgcgaatacttgccgccgtcgcctaactccggttctaactcctggcgggccttgttcagcctacgcattgccgcgtcagtaacctgcaacttaatgttcgactcgctcataatgtcatgaatcagccggaagtaatccgccttcagtgactggtcgatcggctcataggtcgaattcccgttttcgtcgatgaacacgcgttcacccaaacgggtttgctcacgaaccaaaaggaagcgttcagataccccgatcccgcgagagccggcctgcataatggcgtcgatggtttcatcctgggcaattacgcaaatgcagcccaaagcctcgaatgacatattgttgctaacgtcggcacgagcgatcgatacgtggcctttatcccatgctttgagcaccagttcgctgttcgtcttcttaccgccatcgtttccatacgtgatccctaaaaggctgttaaccgccgtcgcctcatcggaaataacggcaaagtttccctgtcggttgttaatcttcgccagaccttccggggtggtatcagataccgggaaagttaggtcacacaatttttctaacttctcctcaagttcgtcacggtcttcaaaaagtttcaccatatcagattgcgataactccccttttagcgcctgcttgttggcggacagcttcgccatgattttcttacgctctttctttcgagactcgttaatgcgttcgacttcggcgacaataggatcgatggcaagcgagttaatggcagacttaccagcggaaggcggctgcgacgtgataacgtaaagcgttgtcggttgctcgctgccgtggtactcgacccaaaagcggcccatcatcgcggcggatacggttccgagaaagtgcatgtaagcggatgattccgggaactgaacagaacgcgctgcatttagcgccagcttgccgacaacatcataatcattggcgatcgagattgttggatacttatccgcgtttacgtcgatatctttgggctttggccagaatgaaacggagtcacgatacccgttcgcacgaatcgcaacgcgcaggggactgatcccctccctttctgcgatggcgataatatcttgcggtgatacgcggtcatttaaaaacatgcccttgctcctgattggttaatcgttcggctaatcatatgccgtattaaatccgagatccagtgataatctaaacacgcttgaaaaacgcgcttggattatcggggcgcatggccccgaacccgtcacaggtatttagcttcgaaagtcgttccgtccgatacactgaagccaacttcctcgcggtacagcgtccagcggcatccatcacgatcgaagatgtatccggcaaccgcgccgagcgcacgaccgctttctacctggtagcgcttgccgacgctgaaggattttttcatcgggttgctatggtcaaggccgacgcattttagcgttttggtttttagttcgatgaacgtcgcaatcacctggccaccagcgccagcaataaacaactcgccgctaacgcctaccgacaaaataacgcgcttcttcttcagttcgacgctgtcatataccatcattgacacattgccttcatcgtcgacgcgggcgggataaaggttattttcgtgtatattaatagcgcggcttgacgtgcatttaatcttgattgacttcgccatttattttctttctccgatctcgatgtacaggtttaccaaatccagaaagtcagccttgcttttgcaacccaacttaaagccaacgtgcgactcaattttattttgcatcgcagccagtgttgcgccgccattattcatcctgagaacttcgcggcatacttcggcgagcttttgagatatcatttcttcaccacctttatttccatgccttcgcaagcgctcttgatatcattaatcagacgattaagccttaaatcagtcattacatggtgatgacgtatatcaataattccagcaacgactaacagcatgacggcaaagataaaaccaccaggcccggacatacacaaaacagttaacatcatcaagataataaatttcatttccgttttactccgttgcgtttcgatggggtgattctacccgactttcgccgggtagttttagaaattcgtgctattctcgataattcgcctggaacacggcgcgggcaaaacctcgcggagtaatggaacgcagcattttagtcctttctgaccttccacccaaaaacttccaggcccaaaagaaattcacgccttctactccatccggcggcgtgagccgtttcggttcgacaaaaccgtttccgtgccatatgcacgttttcttcgtgtaattgtcacagtggggcattttgggatgccacacaggctcgttcggagaaacatagccaccgaagtcgcgcggatggaaataaaaatccggctttcgccatagtgacgataatttcccgaccgggttttcgaccatccaggggcaaccatacttattgcctaattgctcgaccatcttcgcatcccctgctgcggataatacgtcattatcttcccttacgtgcttgattccgctatgcgctaacagcgtgcatggcgggaaagcgaaaatgaagtcaggatctggaatgccgagaatcgatcgcttaacgtcaaaatccttgtcaatccaaatgttaacatactggatatttgggtgaaccattcgaatgctatattctccgtggtcgccggagtcggcgttgaaacagtacaccttgcatcccttgatggcccacggcaggcccatgatgccggagccgtcgaacatgcagtaaataaccttttctttcatgctttccacgcctcaatgaacattctgttcgattccagcgtcagcgtgacgccagccagggaggactgaatgagacgaccgcccggaaccgtcccgatgatgtagcggcctttcgacttcgtgatcgtgatctgagtgaagccggaggcgcggttcatgcggagaacgacgcggccatgagcgttcaggacggcgagaatggaatcagtcttcggatggttcattgtgtagctccttcgtttgttggtatggggacagtatgccactatcccgctgtgttgttttagcaaaacgtgctattccggaacgcaggtcgcgtaatcctggctgatgtagatcgtgcgctgaacgcgaggttcgagatcaccgagttcctggatggtaacatcgttgcttcctacccggcacggaaccgatccgaaaataaactcgccagtctgcttgtcgttgatttgccatacattaccgccttcctttttgacaaccaggaaaggcgcactgtctgcactgaactcttccgggccacgaccgtagtaatgcgtgatcgcagctttggccgcagcgctgaaggcatcggtaacgtcattggtcgccttgtctcggatggccttgatacgttcttcaggcgatccgatgatgtaggaaaagctgttcgaaatggtaactgttcgcattatattttaacctcgttttggtggatgaagtcggcgacgtaatggcattcgatcgggttctcgatacccgccagcacctcgcaagacccgttattcagtagctggcaatgctggcactccgcaccgccaacactggcaatgacaatggcgatcccgttgcatgaaccgccgaacattcgatgagggaagtggtaagcatcgcaggtgcaaaccacctccccggcccgccgtttcctcatacctggcccttctcgatgcagaaaacccaatcacgagcgtcaaccgcaaagcgtgcaacgccgtcgagcaccacgaagacagtaaacccgttgacgccgcgacccttctcgatatcggtcacggtgcggaacagatcgcttgcgccatattgaattttatccccgacgactacatccgcaaatgctttcatggttaatctcctgactggtttcgatgggttaactataccaggcctcgcggcccggcgtttagcaattcgtgcttatttcactgctttcttcgctgccttgtacgcctctttgaaagccggaacatcttcgaccggaatccagaagccggagccatagccatcgtcatagcaagggcattggtcgcagtagtcgccccaggttttctcttctccgccgacagagaatccagtgggcattttgcataacgcttcctcaaccgcttcgatcttgtcggcgtcgctatccatgataacgaagttccacttgccgttatactcgctgcccaggttgattgattcgcgttgaagtttcatagctttagcccctttggctcaattcgtttcgttgaagtcatcatagcaaagccgatcggatggattttaacaaaaaatgctattcctgcgattgctgattattccaccgattcggaatagtggaatagatggtgattgcacctgattccctggtgattagttttgacgaatcatgattgcttttgattgtttcattttgtgcaacgattttgtgagtgtttcaggatttgcaacgaattgcataaa

SEQ ID NO: 231 - DNA, 48973 bp, synthetic construct
  source 1..48973: mol_type = other DNA
aatgtatgcaccatgcacgcaatttgccgatcgaagccagcaaaagcgccaggtgtttttcgccaacatttacgtcgtgtggaaatgtgggggaggaataatcttacctaaaaattgcgcaaaaagtgaccaacataagcctataatagatatataagtatatgataaataataatattattattattactctttatctatatatatgtttggtaagatttcttcggggaggttatgaattcctcttgcgcaagccatagtttttagatgttccgccgcgaaaaaatgtatatagggatatataggggatgacagcaaatcttaccaaacacgcttaaacccttttacggcaaggcttgcgggtggtaagatgacattcccacacaagcaaaaacgacgtaaatgttggagaaaaacacatgcaatataaaggctatgagttcgaagaagtcgacgtgtccgagtggatgcagtacgacgcagataagcaggcagcttaccatgaatggctgcaatccatcacgtttggcggctcaccaggggtagacgatcggccagttgctgaaaagtcacccgccgcattcactggtaatcgttcgtccgagatccggcgcatgttcctggatggcgggcgacgtatccagatgacggcggaggagttcgcggataagttcggcgttcatccggtcgacaaccatttccgcaggccgttgctgaaactcctggagccgggagaagtgttgcgggtgagcctgggggcggggttgatctccgtctttaccgagttcgacgcaatgactggctcaaacatggaggctgaggcatacaggcggcagggcgctatctccgagagggaaaggattaagggtttagtggccgctcttgctgtagactttgccggacatgccctggccgggatttacaaggcgaacttgttcgcggctatcgatcttggattgaccgccagcgatatcagccaggaagcggccaccacgcaatagcactttttgttaaaacccggtcagagcgatcgggtattgtctttccatcgacaacgaaccgaggaaaacgaaatggtcactcttatcacatgggaacacgaaaacagcgagccagtggtgcgcgaattcgagaccgtagcggcatgttacaacctggcggcaaatggtggcttttacaaggcgcagatcgttaacgagttcggggttgttgattatgaattttaaggcgagcgacgtaaaacctggcgtggtctacggatcgcgcctcaataaccgcctttggcggtgggacggcgaaactatgtggactaaaggcgagggcgatgttatctggcatgaatgcggctggccataccccaccatgagccgcctcgatatcgcttattatctttcggttggcgatatgcacgagatggaagatagcactttttgctaaaactcgatcggggcaatgcgttattattaccccatcgaaacagaggagcaaaaaacatgattggcaaccacaacaacgaactgaacgcagcagcccaccgtcgcgccgtcgagcagaacttcaacgcgcttaaagtagcctgcgatgagatgaaagcaatgcttgaactgccgtcatgggatccccaactcgaagactattacgacggcctccgcgtcaagcgtgacgatatcatcaaccgcctgcgcctggctggaatgtttctgtaaggagaacgcaatgattcacgaaattaagtctggaaaacaagtagtggccaccatcacgcagcgccacgttgtagcatttcagtttaacatccccggcaccaacgatatgcagtcgcttgacgtgccagtttgggccaacacgatcgccattgatgccgacggctcgatttgggcctacgagtcgaccgccgaggatgtttgcatcccggactactcgcgcaaagcctgggtggattgtgggccttccgaaaacaagatgcggtcagtaggggagatggatcgcttccatgattgggcagaatcgaagattgaccttcgcggcctgaaatagcacgcattgctaaacgcccggtcaagggatcgggcataatcatcacgaagtctattaacaaaccgattatgcaaggagacagaagaatgcaacaatttgaatctcgcggcaagacatacaacctgccggacactgctacccatgccgcccctggtgcgtgcggcggcctgtattttaaggatggcgatagttggtttttcatgggggatgtggttgggggtgtaccgacgaagacaggcagcttactcgtgggcttctacgatcacgacttggtggagttgaagccaaagcgcgtaccgttcgctttctggaaaaaaatcaaaggggcgatctttaaatgaatcaattcgaattcctggcgcgtgcgcaccgtgcgcttgcaatgtacgccttcagcaagaacatgaagattatcagtgttgaggttgagttcaacaatatcagcatttccggctacgttggcgactcataccacgtgacgaaattcagcttcccatcgctggcttgcctggagcgtgaggcattcggtttctgaatagcactttttgctaaatgcccggtcagcagatcgggcataatggccacacaccaaacaacggagattcaccatgattcgcactaccagaccactacccaataacctttacgccacgattggggttcgcgcggtgagacttattcacatcaacgaagttggcaacgtggctattttgtggtttaagcgccactcaagcggtgttggcctgagcattcaaagattcgggcgctttaacggcaactcccaaacccattctcattgggttgatggctcatactgctggacgcacgttaagcacgtcgagaacttcgacgccaaatcactgagcgacgacgacgcctggaagatggtaacagacctcttcggttatgatgcctgcatggaggtagttggatgatacgtttatcagacttcgatcgccactgcttaaccgggcaatttggcgaaaagccagtaatgtgcaagatctcgaaggtaaaaggcgaccccgtcgagcaggtcaatacgcttaaaggcctggcaatgcgcaaccgactttacatccatgtgcgcggcagactgttcgcacagcaggttcatttttcgcatgggacgtggttctacactggcggggacggggttggcccatcgcagaaaagggttatgctgcgcgagataatcgaacacggttacgtttggactaacgggatctactaatggaaacggtaaaagtaatttgcacgcacgctggctattcgccgctatccacctatttcacgcctggccgcgagtatgacgccatgttcggccccggccttgatgaagtgtggattttgcaggacgaccagaacaccacggaagacgaagaattttggccagcctgccgcatgccggacgaaaagatcgccatgtacgccaataggccatacgaaaacaacgttttgtttgaggtgaaagtatgaaagtaagcaaaaagaaactcgcgctgtattgggccttcttcctggctggccttgccctgcataacagcgtgggctggcagacgatcggaatgctgtgcatgattattggtgtatgccgactgtctgagattaacgggttccgccgtggatatcgggcagcattcagcggcgaaaactgccgtaacgtcatttgataaagtggcgttactgaagtgaaacaatccaatcaggagcaacgcaatgaacgataatttaatcgcactgctggaagaactgaattcctacggctgtgcatacatcgagctttctagcgaacacgttatcgaagtcattattgacgatgacgcagggttcaccaagttaagggtggctaccggggccgaagaggaattcgaagactgcggcatccgtgaagtaaccaaccttctcgaagttcaccaggtgaaggagatccgctaatgaaaaccgtcaaactaatggttgtcaatgcggcccgcgaacgtgaacgccaccttatcggctgcgtattcgatgccgtcgaggtaaaagactcaaaaggagactttcacgtaatacagggcggataccttaacgaatttatcgtcaatccgctggatactgacgaagatttgaccatccgtgttggtagcgagccggaaaacgcgcttttccacctgcgtaaagtatcgaaggcatcgcagcgcaagttgctggttcgcgcactgaagcgcatagcgaagcagcgcggctacaccgatgcatacatccgcaagttcggcacgttcgctggagtaggtgattgggcgcggtcatgggccgacttttatttcaacaaatccggcgaattttgttcagcgcatacggactggctgcatggcacggaacacgatccagttaacggccacgagtggtacgaattcattgaggcggaattagacgccctttgatagcacgaattgctaaaacgaacgtccggggatggtgcatactatccccacactaacgaacaaaggaaattacccatgaacaaaccaaaaatcatcctgatcccgtccgtcgattccgtggttaatacttatgctaaattcaccaaaggcaagcgctataccgcaaccgcatttaccaaatgttccggcgaaatgctgtacaaggtcagcgatgactacgggcgcgagtatcacgtaaacccaagatcttcgcactatcttggtggccatcgcttcgatattgagtacccgatcgaagattgcagtaagcgcgactcgttcacctacgatgacagccgttctatcgccattcgcgctgcaaccatcggggacgggtttattagccgggcctgcatcgttgatctgatcccgtccgataatcacgccaaagacgacgccgacacgctgttaaatgccgtcgttcgcgccggaatcggcttggagttaagtgatgcgtcgtgcgaatcattcatgcgtgaaccgttctcacgaatcgcggagcttgaaaagcaagttgcgttcctgactggtgaacttcaggccgcaaacagcaagatcgagaatgttcgcaaaatcatgcgtagcaagcctggccatgacattgaagattacgcgcgggttttgcgcatgatggccgacgcattcgccaaactttagcagtagcacgaattgctaaaacagatcaggggtaagctggtatagttaccccatcgaaacgaaacggagttacagcaatgaaaatcaaaatcaccaaaatcaacactcttaacggcgacggctcaattaccctggaagaatgcggcctcaaaatcggcgaagttcttgaggtcgacggccacttcaacgacggctcatactgtgtgatcgctccgcgcaatagcgagtttatccaggctggtgacaatatcagcgtaagcgcagacgaatgcgaggttgtggaagaatgagcaacaaatttgggtactgacttacaccattggaaccaacgaggggcgcaaatcgcgccgcctcatctgcgacaccaaagagcgggcgattaggcagcaaaccgttcttggtggcgaacttgtcgagtatctccgcaagcctgaagcgttcaaggtgaactggccggaaggcatggatatcaacggcgctttagcgagcctgcgtgaattgcagaacaacccgaagacgtggagcgactttcaatgcctgcgggcggagccggaagtgaaggccgaccagttcaccaatgttcggtcgcagcacgcggagtggtcggatcgccagttcggcgacgttgggccagtcgggccgctcaaacacctggcgaaagaggcgatcgaggccgccgaagcgccggatgacattagcgagttcgctgatatcctcatgctggtatgggacgcaacgcgccgcgccggattcagcgatgagcagttggctgaagcggtggcggaaaagctggaacggaacaagcgccgggcgtggggcgaggtcaaagatggcgagccttgccaccacgtaaaaaattaacgaaatcgaatgccgtttaaagcgcctgtaagccattctggctggcgcaaatttaaggagtacgattgtatgcctgaatactcgaaagtcgaagatatgccgattggtgcaacaattactggtatccgcatgagcgagtcggacgacgccatcaagccgctggcgttcccggttacgcaggtggagacggacagcagaaaagggttcatcttcatctacaaaaatttcaatagtccgctgcgggttgaagtattcatcgctcgcggaacctgggtagaatgggagaaggccaaatgttcggactgaatgaagcgcagtacaacgccgtaaagcgcatagcaaagcagatggccgcagaaacaaaagacgccatcaagaaggacaagaagacctacgatcaggtcgccgcgaagatgatcgataaacattgggcgcaaatcaacacgctggttactcgcggccagtttatatggatagctggctacctggaaggccgattcggtcgaagggatggcgagtatgaataaaaaacagccaaacgattcagtgacctattgacgcaatcgcgctgatcgggtaacgtgaaccatgtagacacaagaggcggtaaacatccgcaagcctggccccggttaggggcgtttacataggagttatgatgcaatataaaatcatgctcacagcaagaaaaatgggtggcttttgcaaatcctgcattcaagagttcagcatgactattgaggcgaacgacaccgccgacgcggtagagaaagcaaaaaagcaatccggcgtaaatctggatacgcataaaatcaacatcaactacataagggaaatcagatgatgctaactgtgattattgctcttttaatgctttttataggttatcacgtcggagcggctcaccttgtagagcgactttcaaagcgggtacatgaaggcacctttgctgccatgatgtacaataagaaaacggcacgttgggaaaaaattggcgatccggatggtatcgcaaaacgaattgctttttcgccgcttccgtatgttgactgtgagctatttgtgaaactacagaagacgctgaatcggcgaaacaaactgatatgacaaaagaacccgcttcggcgggtttttttatgcccgcgatctgatatactcgcaaatcaacacagaaggaggattacaaatgtctgaagaacgtagaaaacgcgtaacgaaatcgcactttgcaggcaactttaaagcgctatatgaaaaggagttcggcgtggtgctagggcgcacggcagagatgacgccggaacaattttttgatatcgcaaagcgttacttccagtgggccgaagataacgcaatcaaggctgcggagacggcaacgtttcagggcgacgttaacgagtggggagtgaacaagcctcgaatttttacgctaacagggttaagcctgttttgcggcgtgaaccagtcaacgcttacacgctatcgccacgatcctaactatgctcccgtcatggagttcatcgactccgtgatctatgagcagaaatttcagcttgctgccgtcggcatgattaacgcttctttcgtcggaaaagagatggggatcgataagccaccagtgctgaacatcgacgctatcgccggggataagaacgagatcaccgaagagaggttagagaaggcagtgaccaatattcttgataagctgtaagggtcagatatgaacgaaatgatcatttgggaagacctgtcgccagccgataagctggcaattaaggcgcttagtacgcgcaacttttcgctattcatgaagatctggtttcagatcatccagggagaaaagctgatgtggaactggcatcactcctacttttgccacacggttgatgaaattatcgccgggaagcgcaagagcacgatcgttaacgttgcgccaggctccacaaagacggaggcgttctcaatccacctcgcgccgtatgcgtatcttaaatgccggaaggttcgaaaccttcagatctcgcagggtgacgcgctgtcaaaaggcaactccgatcgcgtgattaagatcttctcatctaacgagtggcaggagctatggccatcaaagttcgggcgcaagcagatcgatgaatttcaggtcatggacgataacgaccgcgtaaggctggaaatggtctcccgttcgtccggcggtcagatcgtcggtaagcgtggcgggtacatgacgccaggtttcagcggccttatcgcgctggatgatatcgacaaaccggatgatatgttctcgaaggtgaagcgtgagaaaaaccacgtactcctgaagaacaccattcgatcccgtcgagcgaagaagaagaaaggagacgaaacgccgatcctttccgtgcagcagcgattgcacgcgcaggattccacctggttcatgatgagcggcggcatggccatcgacttcgatcggattgttatcccggcgatggtaacgcgggaatatggcgaatcactccctgactggttgcgacctgagttcgagcgcgacgtgctttccggcccgtcggtggtaattgacggcgtggaatactggtcattttgggaggaaaacgaatcgatcgagaacctggttgcgctacgcgaagccgatctttatacgttcctttcgcagtatcagcaggaaccgatcgccctgggtggcaacgtgttcaagtcggagtggtggcgctattacggcgattccgacaaggcgcacgagccgcgcccggacaagttcgaatatacgttcatcacggcggacaccgcgcagaaggtcaaggagctaaacgactactctgtaatgtgctattggggcaagtatcgggatcgcgtctacttcattgacggaattcgcggaaaatgggaagcgccagatctccgcgttcaggccgaagcattcatcaagcagtgctggcgtcggaacaaggagtgcggaaaccttcgccggatctacatcgaagacaaggcgagcggtacaggtctaatccaggatttaacgaaggcggtaaacggcatgggcgagatcgtcccggtgcagcgcgataaagataaggtcactcgcgctatggatgcacaaccaatcatcaagggtgggcgtgtcgtgctgccggacaatcacccattcgttgcagagcttgaggcggagatgagcgcgtttacatatgacgattctcatccacacgatgatatttgcgacaacgtgtttgacgccgcaaacctggaaatgaacctgagcgacgatccggtagagcgaatgaaacgccttgcgggattgaaaaagctgggtcgctaatacataatgtgggcctgacggcccacacttaaacaaggttgaaatatgaataacattaagatggacgactataatcaaatctttaatggtggcgctggttatgcgtcaaccctcgcgtctatcgcggcaagatttggaacaatgtcgcaggttgaagagttctatcatgaaaacggcatggcgaagaaaatcgttgacgtgatcccggaagagatggtcgctcccggcttccagctaaacggcatttcagataacaccaagtttcaatctgaatgggacgggttaaatctggagccgcaaatcaccgatgctctttgctgggctaggctgtatggtggctcctacgtcctggcgatggttaacgatggtcgcgcattgacttcggcagcgaagcggggtaagccactcgaatctatcgttgtttacgaccatgattccgtttccgtcgcagaggaggaaaccagtccgcgaagcccacgattcggaaagcctaaaatgtacgaggtgaagccgctaaacggcgggcaaccgttcaaggtgcattatacccgtatgcactacatcgacggcgagcgcgtaaccaacaaggtgcgcaagctaaataatggcgctggtggctcggtgctgaacaagtcgattattgaagcgattcttgattacgactattcggaatatctggcgacgcaactactgaagcgcaagcagcagggcgtttggaaggcgaaaggcctggcgctaatctgcgacgacaaagaaggcgagtacgccgcccggttgcgcatggcgcaggttgatgctaattccggcgtcggaaacacgatcggtattgatgcggacgacgaagagtacaccgttatcaactccgatatttcaggcatcccggaattcctttccgcgaaaatggatcggattgtcgccctgtcaggcattcacgagatcgtgctaaaaaacaaaaacactggtggcgtaagtgcaagccagaacacggcgctacagacgttctacaaactggttgaccgcaagcgcaatgacgattacaagccgctgttagaattcctgttacagttcatcgtaacggaggatgaatacagcgtcgagttcgaaccgttgtcgctgcctaccgatgcggagaaagcggatatcttccagaagaacgccaacgcggctcgcagcctcgttaccgaccaggttattgacgccaacgaagcgcgtgatactctgtcggcgttgattcctgaactgaagctaaaaggcaacgctccgaagcagaaaaaacttccggatcgcgccgctggttcaggcagcacgcaaagcgcagagatcttaaacaacacggaggcggatgatgaaagttaacggcagaatcccaaactggcgttatcctgaagcaagcgagcgggagttatcccgctcaatgcaggacgcggtgacagaactcgtggtagaaatgcgggatcgcttagaccgccttaaatttgacgccacggctgaggaaatcagccaggcggaagacgatatcagcgaatctgccatcgtgttcttttccgccgtaattgcggcgctttcctccattgggttgactatctatagattcaattctaaacagtggcttgcaattgcgatcgcggctggcgggcggaacaacgaatcagttatgcgccttaaagaattcggtgctggtgggtatgaagactggtatcaggaatcgctaaataagtggcaggattacgccgaagcgtcaatcaggaagttagcaagcgatatagttgctgactggacaacgaaagttagaaccgccaacaacattggcaagtctcgcaagcagatcgatgaaatcatcgaaggtcgatacgctatctatggtagttggtcgcgcaaccgggcaagcggaatcatcggaacttttaacagtatgttgatgatgcagcgcctaaaagatgctaaagtatcgcattacttttggttcgggatgatggacgaccgcgagcgcgagagccatatcaagctagaaggtaagcgacgccccgttaatggtgacggaatcttccccggcgaagaatacggttgcaggtgctgggcggttccgtcatttgataatgaggatgattgatggttaactttaatgattactttaatcacgtaggaaaggatctgatatggaagcgagcaacatcaaaccgcgtaaaagttggtgatgttgccgggtggaaagatgagcatgggtatgtatacattagattcatgggcaaactgcgacaagctcaccggatcatttgggaaatgcaccacggcccaataccagaaggaatggaaatcgatcatattaaccatgtaacggacgataacaggatcgagaatttaaggcttgtaaccagaaaggaaaactgtaaaaacgtatcaatgagcgtaacaaataagagtggagttgtaggcgtgagttggtgcaagagaacaggtaaatggtttgcatccataagggttgataaaaaagagcgattcttaggtagatacgaagacaaaaacgaagccatttcagcaagaaaggcggcagaggcaaaatacaatttccataaaaatcacggagataaaaaatgaaaagagttcaaaggttcgacacggtaaagatgaaggccagattcgatgagaacggctttctggttgatactccgatcgtggcgcgtatcggtgcgcagacgtaccagacgccaaccgggcagcgcgtcgagttccgcccgcgttcggaggtgttcgatgctgaatcgctggcttcataccagggcaagccgatcactttgggtcacaagatggtgaacgcgcagaacgcaaaaggccttgtcgttggctcgtgctccggcgctggcaaagaagatgggattggtgttcttgttccggtgatgatttacgacggcgagtcaatcgagcaagccaaaaagcgcgtagctgctgagttatcagtgggctacacttcggtcgatatcgatcgcaaaggttggggtaataacgcaactggcgaatattatttcgatgaagaccttccggaaaacttcgaagagatgaaaaatgattccgtctctgattgggttcgctttgatgcagtgcagacgaagattcgcgtgaaccacgtagcgctcgttttccgtgggcgtgccgggattgcgaaattaaatcttgatagcgaacaagaattcccctatgatgacgactcaaaccacaaaggagctaaaacaatgatcattaaaattgacggcgtagatgttgaagtagcagataacgttggcgcttacattgcaaaactcgacgcgcaagttgcatcggcaaccagtcaggtaacgagcatcaccgcagagcgtgacgcacttcagaccaaagttgatggcattgaagatgaagtcgccgcccgcgttgctaaaatcaaagccgacgaagacgcaaagcagaaagttatcgcggttgtttctgccgctggcgtcaagtgtgacggcctggatgttaaggcaatgaaagttgcttacatcaaagaggttgacggtcgtgatctgtctgataaagaagattcgtacatcgacgcttcttttgactttatcgccaactctgataagatggctggcaatcgctccaaagtcttcggcaaaaaagaagatggcgagcaaaaagacaaaggcggcttaccgaaacttgacggcaccgaaatcatcgatccgcaggcaaaattccgccgctaataatttgcggccttcgggccgctaccagaccaaataaacaggagattcaaaatggcacagattccagcttcttattcccgcaagcgtgatattgccgtagcggggcagatcgctgatacgtcgctttataatatcgacggcacttgcgttgctgaaggcgatatcaaggctggcgtactggtggcttccactggcgtagtttccaatggccataaggtcgttaagccagcgaaagcagcgagcgacgtcattgtaggcatcgcgcagttctcgcaagcctactcgcctgaaggcaagtatgacgatgagagcgcggttaacgttatgactcatggccgcatttgggcgatcgcggacgcaactgttactgaagcagattgcgtgtttgattctttcgccacctttaccgcaaacggcaccgtagcgaagggtgatgccggggttatcaaaactggctacaaacacactggcgaatacaccaagaacgcagatggcaccgttctggtgaaagtgcaggtgcttcagggcgccgttgctccagcggctgcaactggcggcgctggcgtataaaataaggggcttcggccccatttttgcaccagaaaaaaacctttgacggcttaacgattcgtgatattcttcatctcgttaagccaaatacacaaacaggagtttttcagatgactatgaaattagatgcattcgaacagagtgcaattaaggtcgcaatgcagggcatgggcgtcgatgccgcaaaactggatgcttacggtatctggactgttaagcagatgactcaattactgaatcgccagtatgagcaggcatacccgcagaccagcgcacttgagcttttcccggtaactaccgagatctcgccgaccgcccgccgctttgagtggctcgaattcgacggcgtaacctctgcgaaaatcatcgccgattacaccgacgatctgccgaccgttgaagcgatggcaaaagagaagtcagggaaagttttccgcctgggtaacgcgtggtttatttccatcgacgaaattaaaactggtgcagcgctgggttcaagcctgagcgatcgaaaagcaaccctggcccgcgaaggtcatgagacgctcgtaaacgatctggtgttcaaaggctccactcctcacggtatcgtgagcattttcgaccagccgaacattaaccgcatgaccgccagtgctgcatggggcaatgattcagcggcggctgaaaaggcattcgaagatctggaagacctgcttaacatgatcgaagaaaccacgctgggccgccatcacgcgaccaacatcgtgattcctccgtctaagcgtcgtcttctgacgaaaaagatgccggacactagcggcgactcttatctgacttggttcaccaagaaccacccgaacatcaccattacggcgatggcggagttggaagatattgacggcgcaggcaccaaaggcgtgctggcatacgaaaaagacccaatgaacatgagcatcgagatccctgagcggttcaacatgctgccgatgcagccgaaagacctgcatttcaaagttccgtgcacctccaaatgcactggtctcatcgtgtaccgcccgctgactattgcgattctcaccgggatttaatcaaaagcgccttcgggcgcttttttattgcattgcattctgcaatgtgctttaatttgaaacctaaagtaaaccaatggagcattaacaatggccagtaaaaaagaaaccgtagaaaccgtagaaaccgcagaaatcaccagcgaagaacagacgccgcaggttgttcaactgcaaaacgttggtgcatgtgcaattcgctataaaggcacaaattacgtctatgagcaggttttcgaagtgccagaaagcgagatcgaccgattccgccacgaaatcttcaaaggccgcgtcgagttctacgacaatccgaaacgcacgcgcgaatacatcgcagcggtgaaggcgaaagcgaaagagatcgtgcagcctaaaagcgcggaataacaaaaactaacaaagggcgcttcggcgtcctttttcatatcaggagagcgaccatgaattacacaattcaagatgtgatcgataaaatgcgcagccttgcacctccgcttaaagaagttccagatgaactgctgtctgcgtgggttgtgcttgccgaagagttcgtttgcaaatccaggttcggggattccatcgttacggcgatcgcattgatgaccatgcacctaatgtttttggatggagcgatgaagcaggaaggcgaaagcctggaatcttacacgcagcgagtggcatcgttcaccctgaccggggagttttcccaaaccttcgatcgcgtatcggcgtcaagcgacaacgaaatgctttctacgccgtggggcaaaatgtactggcgtatgctcaaaatgcgaggcggtggcttcggcctccttaccgccgggaacgtgcgccgctgcggaattggtaggtgatcgctatgaactacaaacaaatccaggcacgcgcaagcgcgggcattaagtttttcagtgacgctgacggcgtattcaacaagtacacgaaaggcgctggcggcggaatcgatccggaaaccggggaagatatcattcctggcgaggtggtaacgacaatcaagggcgcgatcagggatgtaaattaccgtgacattaacggcgaaaccatcctcgctggcgataagcgcgggtttttcactcatgatgtgccaatcatggagggtgacgaaatcgaagtagacggcgagcgctaccgcgtggttaatgcccgtccggtaaaaccaacgggaaccgttgttgcttaccgtccagttttgcgcagggtggcgacttatggctaattacacgatccgggagttcacaggggcaattgatgcatggtgtaaggccgctggtgatgcgctggaggacgttgtaaggtttacgtgtgaagatattcaccgcgacctcgtaatgcgttctccggtggatacagggcgcttccgtggtaactggcaaatcacctttaaccgcgccccgctttacgcgattaacgcatatgaccaaactggcgaaaagacaatccagaacggcaaagccaacattgcactatacgcaaaaggggctgggatcacttcgatctggttcagtaacatgctaatctatgcgaacgcgctggaatacggccattcaaagcaggctcccaatggtgttatgggagttgttgcgatccggttgggcgtttatgttactgaggcaatcaagcgagcgagggcgaaaaatgcattatgagatggcgttaaaatgcaaggcggcagtggctaaatttgccgccgagaacgggttaatggtcgcaggagataacgttgactttaagccaccaaaacacggtgaaacttatctcaagttctcctacgtagaagcggattccagatctgtcagcctttccagaacttgccgcgtttatctggctatggtgcagattgacgttgttttcaaacccgggatcggaaccgacgccgcgcggctaatcgcgcaaaacgttgcaaaatccttccccgaaggcaaggttgttgattctgaaagtaagttatatgtgagcgagtgggcggaagtgtaccgcgttcagaaacacgaaacaggctggctcctacccgttcgcttcacagtaagatgcgaaagcgcggaggagagcggttatccatcaacatgactggtcttagaggtgcttataatttcttgccagcctgtaaatatataggcataatggcgttgttaaactttcatcaaaacaggagtattcaacatgcatttaccaaacggtgcaaaggtcttctttgagaaggctcgcggtgcggccattccgtttaccgcaatgaccaacgacgcgaaaaacccaaaaatcacagtggcggacggcaagctgaaggtgaaagatattgtgatcttcaccgattgcacctggggcgacttcgttaacaaggtggctcgcgtaaaagcagtgacagcaggtgtggcaacgctggaagagttcgatacctccgacactaacaagtatccgggcggcgcggccactggtaacgtgagcgtgatcactgattgggtcgaattgccttgcattcaggatttaggcaaagacggcaacgaacagcagttctataactatcagtgccttggcgatgagcgcgagcaatcagaacctacttacaagtcggcggtgacgcttaactacacgtttgcgcacgattacagtaacgcgatctaccctgtgttgcgttcagccgacgccagcaagcaggcgagagcgatgtacatgtatatcccgcgagcttccgaggttcgttactggtctggaattgcatctttcgatgacattccttccacggctgttaacgagatggaaacggtaacgcttaacattgcgcttaaaggtgctcacgtcttccttccggttgtcgtgtaattaaatggcggggcttgtgcctcgcctttttttgtgcataatagcgaataacacaaaccaatcaggagttaacaaaatggctaaattcaaaattcaaattggcggcaacctcccttctttcaaactgcccgtaaccttcacttgcccggatggcaaagaagcgaccatcaccatgaccgtaaaacatcgctccaccgatgagatgaaagacttttatgagagcgaagataaagcgccaaagggtaacgccgagtttatccgctttatggccgaaggctgggatcttgatgatgagttcaacgacgaaaacatttcctggctttgcgctcacttcccggcgttcgtcatggcactgccacaaacttacatggccgcgcttgcgggccaccgtgcaaaagtttaaggcgggctgtttatctcacgcttcagcctgagctaaccgatcgccagcttgccgagtacgggttaaggcgatcggattatgaggcagatcttgaaacgatctactttgatgaacagaccgcccaaagctggcagctattccaggccatgcaaacgcagtggcgcattgggatgaacggcccaacggggcttgactataatacattgcctatgttcttcgaattgtataaaatcgacaatcgagaagcggcattacttgacttgcaaatccttgagggtgaatatctgaaggagatttacaagaaatcaaaataagcgcctacgggcgcttttttcatatgggggctaaacatggctgataaagtagctgggttgacgtttggcgttgacgtttcgcaggttgataaagcggtacgatcactagcagaactgaaaaaccaaagccagcaaacaggcgctggcctacagtcacttgcggacgctgaaaggcgggccacggcgcagaccgaggaaatgaaccgcgcgttgcagcgccagaagcaagagactgacaaatcaaaaaccagctttagcaggatcgcaagcgccatcgatccaacgatcgcaaaaatggccaacttgcgcaaagcgacggaagaacttgataaagcgtgggcgctgggtcttgttccggacaaggaatttttccgccttggcgctatcatcgagtctaccaccaaccaactccggcggcagcaggcggcgctaaccgaagaaggtcgcgcagcaatcgcagaggcggaggcaaagcagaaggcggcaaacgccgggcgtgattttgtcgccagtctgaaacagcaggctgactccatcgggaaaacacgcgccgaactgctggaaatgaaggcggcgcaattgggtgtatctgcggaagcggccccgttcattaatgccctgaagcagcaagagcaggcgttaaagaaacagcagaatgcgatgggcctggctggcatttctgccgggcaatataaaatggccatgcgccagttaccgatgcagatcacggatattgtaacttcccttgcgtcaggtatgccaatctggctggttgcggtgcagcagggcgggcaaatcaaggacagcttcggcggcttgagcaatacgtttaaggtattgttgagctacattaacccgctaacggttggtgctgcgtcgttgggtatcgccctggcggcaatcgctaaagctggttatgactcctggaaagcgcaacgagaactggcgaatgcgctggtgctgactggtggctatgctgcgaccaccaccgggcagatcacagccttaaccgaagagattaacaaaaactcatcggctacgattggcagcattcaggaaatcgcaacatcgctcgccagttctggtaagtacacaatcaaccagattaagcagatcacgaagactacggcggaatggtcggcgcagacgggtgagagcgagaagacgatcacagggtattttgattcgatcgcaaaagaccctgttaaggggcttgccgatctcaatgagcagtttaatttcctgaaagagggccagctaacctacatcgaatctttgcgtaaaaccaaaggcgagacggcagcagcagaggcggctacaaaactgtttgctgatactatggataagcgccttaaagatatcgcggacagcgcaacgccactcgaaacgatgtggacggatatcaaaaaatgggccgctgactcatggaaatgggtaggcgatcacacggtaggggcgctaaaccttatcgttgatacggtttccgcgatcattaacacgatcaggaagctgattgccgacggcgacgccatgatcgcgcagttcatcgttgacgctggccggaagctgcaaaaaattccaggaatgggcgactttggcaatgaatttctggcgcagcaggagcagctaatcaaggactcgaaagcgaaatccgacacgcttgcaaaaaccattgcggaacagcaggcaaggatcgcaaaaggcgaaatgggttacattgatgccgcgaaggataaaaccctttccggtgggtacagcagcaaaacgaaggatcgcgtaaatcaggaagaaaaagatatcctgaaaaaccgcaacgccaggaagcagcaggtagacgcgggcgttaaaattgatgagcagtatcaggctgaactgctatcgctacaggcgcagctaaaggttttgcagcagcacaaagggcttgacgacaagatcagccagcagcgcaaagactacttcgagacggttgctaaattccaggttttggaagaggcaagccagaagcgaaaactgacccaaagcgaacagcagatgctggcgaacaaaaagaatatcctgtacatggcggaacaaaaggccattgtgggagatcagattgttcagcagcagcgactgaacgccttgcttgacaagtctaccaagtatcaaaaccagatggcggagaagaccaaggcgctacaggataccgccggaatgggtagcaaggagcaggagagataccgggccaatgcgcagatggcggctgactggaaaaacaacggcggatctttaagtgaccctggatttaaagcgatgcaggccgcaagcgataaattctacgcacagcaagatgcgcaaatgatgaactggaaggccgggtttactaacgcgtgggctgacattggcgaagaagttaatgacgtatacaccaatatcggggatatcactaaaaacgcatttaacggcatggcgagcgtgctgactgattttgtcatgactggtaaggccagctttagcgacttcgcaaagagcgtgatcactgacattaccaacatgcttatcaagatggcgctgtttaactcgctttctgccgcgtttggtggtggtggaacgttcagcttcgccagcatgttcagcaaaggcttttctggcggcggttacactggcgacggcgggaagtatgagccaaaaggcgttgttcacggcggggaattcgtattcaccaaagaggcgacgcaaaggttaggcccggaaaacctgtaccgactaatgcgcggctatgcaagtggcggcctggttggtggtaacgcaagttccggatctggaatcaccaacggcggcaacgtcgcggcgtcggcggctatggtgtttaccattggtgatattaacatcacgatgggttccggtcaggatagcaaggggctagagcagggcgtaaggcagatcgtgaacgatatgttcaccgaggctttgagccaaaacgggcgcattgcgaagttcgtcaatgagaaaacgaggaggtagtagtggattcctttaaatggtgtacacaaatccaaggaggggcggcgaaagtcgccgtatccaataacgttcgggcgatcagcttcggaaatggctacatccaaactgcgtcgagcggcattaacacaaagcgccggactgttccgatcgtttatggcggttcggattgggaagcggtttataacttctgtcaggatcacgtaacaaagccttttgtgtggaaggcaccggatggaagaatgggcgtgttcgtcgtaactgccgactccgttaaccttgcgccgcagggtggcggggtgtttgaggtaacggctgaattcgccgaacgcttcacttcagccggataatcaaaaagcgccctttacgggtgcttttttttggcctatgatctggagtcaattagaggagggcttacgatgacagccaatgtttcaaaagattttgcgaactgcctacaaaaacttttccccggcgagatcctaacgctgatcgatatcgacgccacaaagttcggcgggcaggtctaccgattccataacgagaacgtcgcctatacaaccgaggagcttttggccgcggttaacggcgggacgcttcagccaaagatgatcacgtttcgcggcgagcagtacggcccgcgaccgttcggcctgggcgggatcgcaatgtcgagcgatggcacagtggaaaagccaacgctgacggttagcaatattgatgcgcaagcgagtgctcttattcgagcctataacggccttatgcaagccaaagttacggtatgggttttggtcaaggaattgctacaaaacgacggcagcgttaaagagggcgattttaggcgatttatttactacatcgagcgcccaaaacaggtcgacccgcaaaaggcaacgttcgaattaacatccgtgtttgatatggatggattaatgatcccggcccgtctgacgcaaaccgtttgctattgggcgcagcgtgggtggtacaagtctggcaaaggctgcgactacaacgggcagaacggatacttcgacaagttgggaaacagggttgaagacccgtcgcaagatgtttgtggcggcttggtttcttcttgcaggcttcgttttggcaatgaaccgttgagttttggcggttgtgcgacagcaacattgaaaagtggaaggtaatatgttaactccgaaaatcaaaatgcagatcatgcagcacgcgaaagaagtttacccgcatgagtgcgcaggtctggtgacgcaaaaatcacgagtgcaaaaatatcaccgactcgacaacgtttcgccagatcctgagaaagaatcaatgcctgatgaaacgcagtatgcgctggcatcaatggagggcgagccgatcgccttcgttcactcccacactggcgatggggcaaccacaattccgagcgccactgatttatgcttttgcgatgagtctggcttgtcgtgggttatcgtctccatcccggaaggtgatatgcgaatcattgagccgaaacgccgacctctgattggtcgcccctgggctttgggcgcttacgattgctatggcctaatcatggattttcacaagcgccacggcgtcacactaaaagatcggcgattgccgttcgaatggtggaagccggaatacaaagagaatctttaccaggattactggcaagaggacggattcattgaaaacactggcgagcctgaagttggcgatatgatcatcttccagattcaggcggaaaagtggaatcacgctggtatttacgttggaaacaataacatccttcatcacgcgtttggcaagctgtctcgcagggatatctattctggatggtacgagcagcacaaggttttaatttgcaggcacaaggagcttaaacatggcatcacatacaaagacgattaaactatccggttccctggggcgtcggttcggtgtcttccacaaacttgcggttgattcagtcgctgaatgcatccgggcgctgtcttaccaggttgaggggtttaagcctttcatgcagagcaaggttggtttaaatatgcgcttcggcgttgtcgccgacggaaaaccaatcagcgcgaacgaccttgcgacttttgccgtggcgagggagatcagaatcattccgatcccaaaagccagaaagaacggcgggttgttgcaggtcgttatcggagcggcgattatggttgcggccttctttactggcggcggctcgctggcggctatgggcgctttttcatcggctgcattcatggctggcggctcaatggttttgggtggcgtaatgcagatgatcgcaccgcagatgggcggcaatatgcgggcgagcgaatcgcctgagaataagccatcgtatgcgttcggcgggccgattaacaccacggcggcaggttatccaatccagttgccatacggttacagattggctggcggcgcattgttcggttctggatcttacgcagaagacaacaactaattaagccattcgctttttagcctgggggcgtagcctccgggctttttgtcgtgtacaattgcgagactattaacaggaggctaaacgatgactaatatcaaggcccgtaagggaggctcaagcaagccgcgtaccccggtagaaatgccagataacctgatctcaaaagacaagatcaagttattgctggctgtttctgatggcgaggtcgttaacgacttcagtttgaagcagttgcatttcggcggcgtcccggttcaaaacgaagatggaagttacaactatgaaggcgtgattgctgagtttcgccccggcacgcaaacacaggactacatccagggcttcagcgaatcaagtgctgagttccaggttgctcgtgaagtcactcacaacacgccttatacgcttaccgtatcgaacaaaaatctgtctgctattcgctttcgcctgttatggccgcgcgtgctgactcaaaaagataacggcgatatggtcggatcggttgttgagtacaagatcgagatggcggtagatggcgcaagttatcagacctacctaactggcaaaattgacggaaagaacacgactggcggttacgatcggagcattcgcgttaacctgccgcaaaacttcacgtcgcaggttcttatccgcgtgagccgagtaacgccggatgctgacggggtgaaggttgtcgatgccttccaggttcaatcctacgctgaggtcattgatgcaaaattccgctacccgttaacggccatgctttacgttgagttcgatagcgacctgttccagaaccagatcccaaccatctcactcaaaaagaaatggaaaattattcaggttccgagtaattacgatccgattaatcgcacatactccgggacgtgggacggtgtttttaagtgggcgtggagcaataacccggcatgggtgctttatgacctgatcatgaatcagcgctatggtttagaccagcgtgagttaggaatcccggttgataagtggtcgctgtatgaggtggcgcaatactgtgatgaacttgttcctgataatcgcggcgggatggaaccgcgctatttgatggatgtaattgttcaatcgcaggttgaggcgttccagttggtaagggatatttgttccgcgttccgtggaatgacgttctacaacggggaaagcctttcgattatcgtcgataagccgcgcgatccggtgtacctgtttacggctgataacgtcgttgatggcgttttcgttcggacgttcccaagcgaaaagacgatgtacacgtcgtgcaacgtcatgttcgacgacgaagaaaaccagtacgaacaggatgttgaaccagtattcaaccctgacgcagccatgcggttcggccacaacccgaccagcattacagcgatcggatgtaccagaaggacagaggcgaaccgccgtggtcgctggattctgcaaacgaacctaagcgccacaaccgtttcgttttctactggcctggaaggtatgattccttcttgcggcgatgtgatttacgttgcagatccgcattggcaatcggcctttaacctggtgctatcaggccgcgttatggaagtgtctggcgtgcaggtgttccttgcctaccgctgcgacgcgaaggctggcgacactctgatcctgaatacagacgacggcaagccagtgcgccgcacaatcgccagcgtttcggcggacggtaagaccatcacgctaaatgttgggtataactttgacgttgcgcctgacagcgtattcctgatcgagagcgatcagcttgcagcggaacagtatgtagtaacccggattgaaaagggtagtgatgacgacgaatttactttcgccatcacggctacgcagtacgatccgaacaagtatgacgcgatcgataacggggtaattaccgatggccgaccaacttcggttgtcgaccctgattcaatgggcgcaccgaaagacttaacgattagctctttctcccgcattgttcaggggatgagcgtcgagacgatggttatcggatggtctgccgtgcagtatgcaaaactgtacgaggtgcaatggcgcaaggacggtggtaactggaacaacgttccgcgcactgcgacaacgcaggttgatatcgaaggcatctatgctggcgagtatcaggcccgcgtgaggtgcattagcggtgggaatgtagcgtctccgtggtctgaattggcaaccgccacactgaccgggaaagtcggagcgccaaaaggcccgattaacctgtttgcgtcggacaatgagatcttcggcattcgagttaagtgggctatgccggaaggagcggaagacacggcatacattgagctttaccagtcgcaaagcggaaccgatcaggacgcaagcctgcttactctgattccttacccggcggctgaatactggcactcaattttgcccgctggctacgtgaacttctacaaagccagaagcgtagaccggatcggcaatgtttcagaatggactgattacgctcgcggcatgtcgtcgactgacgttaacatcatcacagatgcgatcctggatgaaatcctggatagcgacgcgatgaaggaactacaggaaaacgcacaggatagcgcggcaaaactcaatgactacgcgaacagcatcattcaaaatgcgctggcgaatgatgcggacgttaggaaaatgacgaaggagaacggtaagcgtaaggcagagatcgcgcataccacggtgctgattgccaacgaatcagaagcgagggcggctgaaattacgcaacttaaagcgcagattgatgaagatatcacgtcgcagattacgatccttaacgaagccctggcgacggaaagcgagacgagagcaacgcagattggtcagttgcaggcagattttgcggctgatattgacggcgtaaaaacaacaatgaacgctggttttacgcaggttaatcaggctattgcaaatgaaagtgacgcgcgtgcaagttccgaggcggcactagatgccaaaatcgggcagaactccgcagcgctaaaccagaaactcgactcgtgggcgaacgttaatggcgtcggttccatgtacacgatgaagttgggcttgaggtacaacggtcaggagtatagctccgggatggccctacagcttacctcaagtggtggaagcgttgtttcgcaggtgctgttcattgctgatagatttgctatcatccgtaatgcggcgtctggcgcgtacacgctaccgtttgttgtgcagaatgaccaagtgttcatgaataacgcgcttattcaggacggttcgattaccaacgcgaagatcggtaacgtcattcagtccaacaactttcaggagaatgttgcaggatggaggcttgataaaaacggcgtatttgtcaactatggctcaacttctggcgaaggttccatcaagcaaacgaaccagaacatcactgttcgagatggtagcgggcgcgttcgttgccagttgggtaggatcactggatcatggtaaaattaatgccgggagaaatcccggcttaaccaaaggaggcagacaatggcttatggttttcaatcatgggatgcgaacgggaaccccaacaactatgggatcgtccctgtttcagttgctggatatattgcattagcgcaaggccagaaaagcggaacgtggtattacaacgtcccgcctgggttgaggcttggtttcttttgggtcgcaaatcaagaccagtacggcacatcgaagaggcgaattaccgttagtggtaatcagatcgttgtttcagatgcgccagatgatgcgctggaatcaggcgtctacccggcgacgcaaggttttattgtcgttcaaattatgagttgatgattatggcagattacggaattttacttaccaatgatagcggcaatgtttgggtttcgcctcaaagcatcccactggcactactatcaaagcagagcatcactcttaggggtggtactaactccgatgaagtaagatcggtaacttacgacacgaatcacccatgcgttccgttcgtggtctttcatggatcttcgccacaaggtgcattcacaaaaatcaagtacagcggaaacacttgcagcgttgttttttcttttggtaagcaaaacgtatatgcggaggtttattttttctccgtgttcccacagccaaatcctggttatgggcttgcaatttgggatgaaaacggcacgctgattttgaccaatgaaaccagaacactttcagacgtacagacctacggcactggttttaatctaaacgtcactaacggcgggaagtgggcggttagtcctgttcagttaggcgcgatcgttggtgttgttcgcgatccctacccaagaccatttcagggcgactattgcgcagcggcattctttaacggctcaagcacgcaacttaccgcatatctaacgcaggcaccaggaggagccgccagcgatctaacctacgtcaatatgaaaaacacctgcatcgctattgattgcgcaagatacgactaaaagaaaggggccatacggcccctttttctaccccttgagatttttgatctcctcttttaattcatcaacttgagcagacagagctttgattgcgcaaattgcatccatcaaaagagcattattgtcaagcacaagtttcttattttcaactacgttaccctcatcatcctgataggatgcgctgctttctttaacgtagcacgaatcgatatctcgcacctgctgtgcaataactcccctacgctcgcgtttcttaacatcatccttataggtgaacttgaccagattcattgctttgatgttttcgagtgactgcaaaccatcataagcaacaacattgtctttgtagttaatgtcagatagaccagcaaaaacaacgttgccataagcagtgcttgcaatattaccatctgatttaaactgccaatactgcgtattaccgccagttccccatttgctgacctcaataacggcacgatgttcataacccctatgttcctcaagccacatagcgcaacgcgcaccgttaccattaatgttgaaccgtgagataaatgatggagatttaaggatatcaccattattcccatttggatcgctagttggccacgctacaaaagcatcattaacggtactcctcacagtcccatatgacacaacacttccgcgaagatcggcagccccgccaactcgcaacgtgctcgacattgtaacagcgccgcgaagatcggcagccccgtcagcacgcaacgtgcttgacattgtaacagcattgctaaagtttgcattcaacccggtaacagcaaagttcgatgcatcaaaaacaacctgcttcgcgctgttcatatctccattagggcggaagtacattccttgaccattttcagggattgagtacacgatcgcattgctgttatttgccctaatagtgcaaccgttcagggtcagcgtggcgtttcctccaggaacgctaattgcctgcggctggctgaacgtgttagctacgttggtgcgcgggatcgtattatcattagccatcaaatagtcagacggtgaattatatacaattccagaaggctccgtgtcaatccaggtataaccagtgcgatcaatgattggccccgtaatcgaccctttgttagcctgtacgtttacatgattcaaccacagttcaggaacccatccgccgggagcatgaatataaacatcaaacgaggagtctgtgtttttcaccaccccaagattaatgcgtctggtgtcgtttggtctggcagcaatcagggtgcgctgagtaaaccaagtgtcaatattattactggttagcgtatcgggaagaccgcggccagaaatcgaaaagatatcaaccgggagatttgcagtgccataaccagtacctccgccaatgatgaactgagcaaatgcgtagccatcaccagcgttcttgacgttggcgatcttcatccacttctccccagcgaaagtgccagtaattttatccggcacctggacgccagccacaaggtcgacaacctgatcacgaagattttgcgtctgccccttcgcagtttgcgcgtcgttcttcgccgagttggccgcagtttctgacgcttttgcattggtctccgaggttttggctgcggtttctgatgcctttgcattggtctccgagtttttggccgcagtttctgacgctttggcgttggtctctgaggtcttcgctgcggtttctgatgcctttgcgttagtctccgacgtcttcgcagcattcttggatgcagcagcattggtctctgaagtctttgcagcggtttctgatgcctttgcattggtctccgaggttttggccttattctccgaagatttagcgttcgtctctgaggtcttcgctgcggtttctgacgctttggcgttggtctctgaagtttttgcagcgctttcagacgcagccgcagccgtagcgcttgcgcccgcagcttcggaatctgccctcacctgatcggcaagactttgcagagcttcgaaatcgaagttcttaaagaagtcgacagcatccgcaatttgagtttcctgtgactggtagtagcgcagagtttccgcaacatcttgcgccagtccgtcaacggtcagcgagtcacttaacaggatcgcgtaatcgctagacgctacgacagcgccttttgtggtgatggctttaatttcagtatcgctaaccaccttgtttacgacggccatttgaattggtgacgacaaaaacataatcgtcgcaccagggcgaatcagcgaaagcgatgattgccattttgtgccagtcccggtaacggttccgtctgcggccatagccgctttgccttctctgtatagtgccatgtttttaagcctcattggttgattgagtaacgcagataatagcatcaatgaaccgataaaaaaaggagcctttcggctcctttagttgtcaaattagaacgggatatcatcatcgaaatccatccccgcattcccgccgctgttttgcggcttaggcgcttgttgcggcttgggttgttgaggctggccccacccggattgctgattgccgccgccgctttgcgaaggatcgcgctggctgaattcgagttgcggcataatcatttcgttgtggctgtaaattgtgccgttgtgctcgcggttaacgatctgaagcgtccggcaggttacgctgatcaccttatccatttgcagcgcttcgtcgtaccacttaatcatgttttcttttgcaaagaaaactgcgcggtagttcgtgtaaattgtttcgtcctcgccatcacgattgcggatcttcatccgctccgacaggtctacggcgtacattttccacggcccgttattgttgctgccctctttgacataaggcgcttttcggattacccctgttacaacatgcattgtcattcctatggggcggcttcccgcccgttaaattagttgaaagatgaaatatcttgcgcttctggttcaggttttgattctaccttttccggctcgcgcttcgcaacctcttgcggtttaccggggttaaatccgtttgccggggtgactttcagttctgcctggcgtttggtgatatcgtcttccgtcattttccactccgccggggttaacgtttgtttcgccagcttatagatctcacgaagcgattcgagatcttcgcacgcgtcaatgcgttttttgaagtctttcggtgtcattttcgtaatttctgcatcatcatccgcctgcttgatacctagcgctgcggccagcgcataacggcgggcgtaagatgttgttgagccgtatgcttgttcgacggttttactgatcggcatattgtactgaaacgccatgaactcgccgctttcatgcaaaaacatagtttcgaggtgcatcaccttttcggtgctcgtatccatcatggattgaatgaccataattttgttcttctccagcgccggggaaatagcgtcgaggatatccccaagattcgcataggtgttcccaagatggttgttcttaccgcttttctttgcggccacgaagccagattttgccttgattaatgcggctgcgatggtggtaaatttttcagatgtacgcatgataaagtttccttttcctaattggtaatgcgcactatatcacaagtgcgcaccagtgtttagctatttgtgccgtatacgtccgggaacatgtatttcacaaactgaggagtcggcaaaacaacttccgccgcgtttgactcatatgatggccatgaatcgtgcttcacgcattcagcatactgatgaatcacgctttgatactgtttgcgaccgatctcgatctgctggctggtcagggtgaacgccagcggagcaaacggtgattttttctcctgcgttagcagtctgacaactaccgggcgtttttcgttgtaagtcttcacgaacagatcgcgctgcaatgccatcttgagatagtagcccaagttgaaggcgagtcgcccgaaatcgtcaggcttggaagattgcgtggttttgtagtcggtaatcaccacgacctcgaaaacctcatccgggttgaacccccactccttgatgagttcgggatcggaaacaacgtcaacatgatcgagtcgaaccttaaccttgacgccgaagatctcaccgaagattgacaattcacgctgtgctgtaggcgattcgatacatgcggcgtgtcgcgggttagccagcatcacgctgcgcatttgaacaacggcatcgaaatcaacatccttaaccagcttgcgcccggagtttatcgcggcgctttcgtcgcacagttcaatagcccaccaaacatttacgtcaatcccggcgcgatatgccatttccagaagttccgggtaatccttgttggacgtcccaatcaggccacacgctttcagcttcgcagacagtgccgacttcgacgtaatcagatctttaacctcgcccggagaagtcgcccgcaggtactcgccattaaactttgccgtctcaagcatacaggtatgcgaacaggttccgaacgccagcgcggctgcttcctcacgcactttgaatttccagtgcgccggggatgttgcgtaaatctcgccgaggcttgagccgctaacgtattccgcgcaccaggagttaggatcgtggtaatcatcgttggataattccgcgttggtgtatgccttaaaaattgcttcagccattggtatcactccatttgtggtttcgttgcgttaagtatacgcatgacgattccaggcgcaagtcaaaaagtgctatccgcagttggttaaaaaacgagcgaaatttacgtaagatttagtaagatgcatcttacgtgatttttcctatatatttcatttagttaatgcaaatcggtaagatggtaatatccctataggtaaatatccatgaaaaatatggcgcgaaatccagcgaaaaaagacacgcaccccggagaaatcttaccaagattgatagatacagatagagtaataataataatattgttatttatcatatacttactatctatatattgcggttaattggttaaattttgcgcgaaatttacgtaagattcatcttactaaatcttacctaaagtggttcgaccagctgcaagccactgaatttcaggcataaaaaaaggtaagactgatttgctcaatcttacctaaattctggtcaacatttaatcatagaagcgacgatgccctgtacaacttgcgttcaaatccgagcttaaagttgtcaccgttcggaacgataactttaagatcccgatcgtcagcagccgccagcatatcccgatctccacgacggcaaactacccgcatttctcgcttaccttctccgccattgcctttatacctgtacgccacgatctcgacgtttgaaggtatgatgcaggcccaaacgtcgcacttgaacgaactggcaatattaaagtgcatcgcctcaatccaggatcgagcaaggtaaatcggcccgttaccgtcgtcgctctgattggtcactatcaccgatccgaatgtcagatcgccagccaacatcttctcccgaccctcctcatcaatgaacagcatgttgcaatactcatcatccggcccatcctcatgcactagttgcattggtagcgcgtgaattagctcctgtctgcagttctcgtgagtttttacgccaaccagatatgatttgatatgctcattttcaatgccctcatagagcgttacaggcgtgctatcgacggcctccgttctgtttaaaactgccatcactctttcatgatctgccatctttccgtagtcatacccgttatcacgagctacctgcttgtttctcttgactacgtattcttgcggaacctttccgagatagcgcccaagaatgttgatgcactcgctatacggctggccgcttaacttcattaaccagccgatccccttatcggcaccgcaaccgccacagtatgcgccgccatcacctcgcgtttccagcttgtcagtccagcggaatcggtctttgccgccgcagttcgggcagtcctggtgcttgccgttgaagtatcgagagtggatgccgcaaatgttctgcaacgcctcgcgccacatgccagccatgtacggcaaaacctctttttcatcgtaaaaatccacgtcgtaacccccaaataaaaaacgcctacacgagaatgataacccggcaggcgtttagtgtttagtcaaattgtgctatcggactacgcggagcatttcgcggcggtcgcatcggcgcgtcactggcttgccgttgctgtcaaatcttaaatcaggtcggcagaatgaggcgcgaaaacctttgcaattgttccgtcggtagctcttatgtactagataagcgccatcggctgagatcataccgcgcttacgccactgctgaacaacctggatactaactcccaactcttttgccgttccagcgataccaccgaaggcatcaataaccagctccatccgcgcagtcaacccagctcgaacctcatccttcagcacgtagtaaccagtcggtcgcttgcgtttcttcttatctttcccgcgcgacgttccgttgttgccgttcaaggttcgcttatcaaccattgccatttgctccataattcaaccctcatagcattttttgttaaacctgataaaatgttccatgtattatacacgcaactatgcgaatgacaaattaggattgacaatggcaagcacagaagaagacgtagcatattttaagcgactatttcgttatgaaggcggaacactgattcgcaaagttacaaccagtagtcgtgcattcgctggagactccgtagggtgcgagaacaacgttgggtatttacaggtaagcgtaaaaagcaaacccctatacgttcaccgaatcatttgggaaatgcataatgggcctatcccagaaggaatggagatagatcacatcaaccaggtcagaacagataacagaatcgaaaacctgcgactggtaagccaccaagtaaaccttaaaaaccaatcgatgaacagtggcaatactagcgggcacgctggcgtaagctggtttaagcgaggcggtaagtggagggcaacaataaaggttggcggaaggcaaatacacattggttacttcgcgtcgtttgagtcggcagttgccgcacgaaaagcagcagaaaaacaatatggttttcatgataaccacggagcagagaaaaagaaatgagcttatcgattgagcaacaaatagatctatacgcagacaaaatcccggcaatccaaaagagatttaccgttggaaatatcgttccgtatccatatcaggctgtggcttatattgagacagccaaaagaatagcaaactacaccgcaccgttttacattaaggcttcggtttccgccgggaaaaccatcatgatcgccatgctcgcagcgcagtgcaaggcaatgaacttacccatgatggttcttgctcgccaggccgagatcgtgaagcaggattccgaggagatcagtaacctcgacgttccaaactccgtttattgtgccgggttaggcacgaaggcggcatacttcccgatcgtcgtcggatctgaagggacggtggttaatggcctgtttaaaatgctgggcgactacgtgccttcagttctggctattgacgaatgccaccaggttgactggcaagatctggcggaagcgatcgccaacaatgaatcgttcgagtacatgagccgaccgaaggataagccgtatcgcgtgaacggggaactggtcgatgccgaccacccatacgacgaaaaattcgacgacgtagaattcggcggcggtcgcacgcagtacactatcgtcatttgtgagttaatgcggaggtgccttgagaagacagggcgagaacttcgcatcgttggctatactggttcggagtttcgcggcgtcattccgattttacaggaagacaagagccagcctggtttttggcgcgagcagatcaccgacattaacacaaactatcttgtcgagttcggatcggtggttccgacaatttttggtgatactgaatccgaagggttagggtatgacctatcagaattccacggttccagtcaggacggtacgcaggattttagcgcggaagaattgcgcaagatggaaaagaaaatccatgaatccggcgaaatgacgaagctgattatgcaaaaggtcgtggagcgtgcgaaaacccgaaacggagttctgataacttgcgctggacagcggcattgcaaggaggcggcgagctatctaccgccggacgcaacatacgcgatcatcaccgaaaagacgaactcaaagaaacgcggcgaaattttggataaggcgaatcgcggtgagatcaaatacatcttccaggtgatggccctaaccactggcgttaacgttccattttgggatttttctgtgatattgcgcaagatcgggtcgcttacgttgcttattcagcttttggggcgcggaatgcgacttctgaaggactggcaaaaacagccgccttactcgtgggtgaaagaagatcaccttgtctgggattttgccggaacaatggatgacctgggccagttgtatttcgatccgatcttggagcaggcgcaataccaaagacgcaagagcagcaagaacggcccgaaaatttgcccggtatgcaagggggaaaatagcgagtacgcccgcagatgcattcacaaagacagtaacggcaatcggtgcgaatacttctggatctcgcagaggtgcgaagaccagaaagacccgcgaacagggaagattaaaatcaaggggtgttacgctgaaaatgatattgttgcccgccaatgcagatgctgcggcgttcagcttaaagaccccaatgacaatctcaccgggaagcactatacgcagaatgactggtatgatgttgtctggttcgatatcggcttgactcgcaatcagtccgggatcatcttcaattacgtgttactgaaccatgacggcgagcgattcaccgcaagggaaaagttcttcccggaatcagagaatcagatttgcggcaagctgtggcggcaaaaggcagtcttccagcacgttagcgacgcggtaatgcgtggcaagttgggcggaatgaaaaacgcccgcaagatcctggagtatgcggaatacttccgcgcgccgaagcgcgtaacgcatcgcatcaacggcaagaaggaggacattatttcccgcaaagactttggaggcgaggagtgattacagacaaaggggattacctcgaatattacggcgggcctgtaaaggcttgcccacttgaaaaaatcgaccagatgaacagcgtttcgtggctgcgttacgaataccccgattatctgttctggcatacggttaacgagggtagcaagcacaaggcgagcgccgttgcagatcatcaaatgggattgcttaaaggcgtaagcgatatccttgtgctgattgggctgggcggaaaatacccgttcgccgccattgagctaaagcgccagggtaaatcccaggcatcgccagtgagcaaggagcaacgggaattcctcgccgccgtccgaagccgtggcgggttcgctgccgtggcctatggattcgagcagtttaagatcgcgtttgaagacgcaatcaaatagcactttttgttaaaactacccggcgcgagtcgggtattattctcccatcgaaacgaagaacggagtatttaaaatgaaaaagattattgctttaattgttctatctcttgttctcattggttgtagcgaaaaaccaaaaacatatatttgcggtaatgaatcgtttgaagttactagcgactatattaaggtggttcgcggtaatagcgctggcgttttaattgatggcattggtgaaaaccagtataagctggttacaccacttggaacggctttttatactgttaataaaaacaccattgatattaaagttagcgtttatcagaacactttaacttgcgaggttaagtaataatggcaaaagatatcacagacaaagacactcacgacgcgttcacgactttcgaacagcttgagcgtgaaacgttcataggcaacgcgcttgccactggcggacactatcaggccgtcaagcctgataaattctaccaggtaacgggcaaccgctacgccgggagcaagacgccggatatcgtccgcgacaagtggtcaaccgatcgcagccttattgcttacatggaggagcgttacgggccatacgacctggacgccgccgccgaagaaagcaacaccgtctgccctaagttttacgacgaaaagaccgattgcctcaagcgctggtgggggaaaaataagcacgtatggcttaatccgccttactcgttcccggatccctttgtgctgaaagccattgagcagatggagcatgacaaccagatcgatattttgcttcccggcgacaactctactgcgtggttccgcgacgcacagaaggcagcggctgagatcatttggattgtcgcagacgtcacggaggacgaagacggaacgcaactaagccgatccggtcgcctagccttcatcaacggcctaagcgggaaaccagtcgacaacaacaacaagggtagcgtgattttcatcatgcgcaaactcaagccgggcgaggagcaaaaaacgttctacgtcccggtaagcgaaatctgcccttcattaactaaaaagcgcatgcgcaaacgtgggatctgaaaaatggaacagcttgaatctttcaccgaatacctccacatcgtcgtcactctgctggacaagtacggcttcatcggtacggatgaagaaaagatggccttcgccgatagcatcgatggcacttatcaagaattcatggataacggcacgccgcttgctgactggcccgcgattcttgagcgcgaattgctggattttcgggcgcgtgaaggtgcggaatatttcgcgaaacagcactaattgttaaacaatgcccgccgcgagcgggtattattgttccatcaaccaatcaggagctaacgccatgaacaccaaaaccattgccgacaccatcaagatcgcacaagttaagccgcgcatcgtatctcgccacctgattaacctttctcgcctgtgcatggccgactacgtggcgaagcctttagagaatggccttgatggtgaaatcggtgcgatctacttccgcgccgcgcacggcatcgaagaaattcacatgtacgagcagatggcggaatgcttctgcatttacggtgacgaatgatgattgtagaatctggccgcgctgccgtatggcagcatgccaaagaggctggcattagtgacgatatcgtgatgatcgcaaagtatttcgatatcaaggatatctccattgtgttcaatgggaaatttacctatcttcatgagcgaccactgaagcgaacgcgtatagcggttgcgacgcgggcagaggccgacgcgctgaagatgttcattcacgaatctaagcagaccaaaaaatattacaagtagcgggagtgttgagaatgcgatatattgcgatcctgattacggcggtggttctcactatcgcaatcttcaactacgcaattcaattgggataaattatgcaacctaaaatcacagacgaagaatttttagccgcccgcgaggagggcaagacctaccgcgagatcgccgaagagttcggcatgaacgttcgcagtgttgagcgtcgcggcgttcgacttgcccgccaggggcatttgcacggtaacaatcacgtagcgaagcacatcccggacgggttcggggtcaaaggcacatcgaccatgattcgcgcgaacggtgatgaagttgtgcgctgggtcaagtcagaagtagaccgcgaccgcatgatcgctttgatggaggcggcgcaagcatcattctgcgaagacctacctcgcgctgaaccgcagcctaaggatgaatctaagttttttattgaggatcagctcgccctgtatccgatcttcgatttgcacatcggcgcgatggcccacaagcacgaatgcggcgagaactacgacaccagcacggcggaaagggttcttaaccgcttctttgactactccgtttcggttgccccgcagtcgaaaaagtcggtcttgctggtcggcggtgacttccttcacagtgacggcctggacgcagtaaccccggcaagtggtcacgttctcgatcaggatagccgttacgcgaaacttgtttatgtggctattcgctccttgcgccgagctgtgtcgctactgctgagtaatcacgaagaagtagaggtgcaggtaatcgaggggaaccacgatcaggctggcatgatctggttgcgtgcagcgctcgcagcgttctatgaaaatgagccgcgcgtattcgttgacgtcagccctgcaattatgcatcgtaccgtgtggggcaaaactatgctgggctacactcacggccacacgatgaagaaggcagaaacgcgcctcgccgcaatggctacagacttccgcaaggaatttggtcaatgcgactacatctacacgcattcgggccattggcatcaccagaccgtaacggagcactcgttagggattgacgaagtacacggccagttaggggccaaagacgcttacgccgctcgcggtggttggcgctcatatcgccaggcggcggttattctgtacagcaaagaatatggcgaagtaggccgctttatctaccgcccgaacatgtaaccacaacggccccgcgaggggccaacaaggaaaaccaatgaatagaaatatctgcattttcgatctcgatggcacgttgtccaatggcaaccaccgtttgcacctgctgccgaaaaaagatctccacctaaccgaaagctggacggcgttcaacatggcggctggcggcgacgctcccattacggacacgatccgggtaatggaggccatgcgcgcagcaggatttatcgtcatcatcctgaccgggcgaagtgatgaggcacgcgagatcactgaaaaatggctggtgcaaaatggcgcatcgcattacgacctgctgattatgcgctccgcctccgacaaccggaaagatacggttatcaaagaggaaattttacgcaagattggcattgagcgaatcgttgcagcgtgggatgatagccccactgttattgcgcacttccgtagcctgggtatcacaacttaccaggtctgcgactacggcgaaaaccttcacgaccatctgaaatctcatggagtagacaaatgaaaaatgtaatcatcctcaacggagcgccgggcatcggaaaagacaccatcgcggaaatcatcgcccgcaaatgggagtatcggatcctgagtttcaaatcaccgatgtttgacattgcgcgcgccatcctgggtgcaaccgactttgcccgcttcgccgtccgttaccacgaccgcagccggaaagaagtaaagtgcgactttttaggcgaccgctcgccgcgtgaattcctgattcacattagcgaaaatttcgtaaagccgacgttaggcaaaaagcagttcggcaagttgctttgcgattctgtcgtgaattcgcctgttagttgcgtcgtcagcgacggcggatttgacgaagaagtagagcacatcgcggcgcacgatagcgtaaacgtctttgtcgttcgcctgcatcgtgacggcatgactttcgagggtgatagccgcaagcatattagccgcccggatctgatttgcgaaacttatcacgaattcgattttgatatgacgactggcgagccggaagacgacgcgcaaaaaatccttgatatggttttcgaagggtattaatattctctacgtaatgcctttattatcaccgccttaaactttgggagccttaacaggttcccttttttttgttctttatttggcccaacgcatatatcatcgcattatcacttaactaacagaggttgcatatcatgcgtgaattcatcaacgcggcaaccaatggtagcggcggtgttaccctcgcaggctctgcgaccgggcaacttatcattgcggccattggtttatttttcatgattctattcggctcattcggcgcgtggttgcgctggcgagattcaaaggcgctgcgtgaagcgctggaagccggggatatcaaaacggcggtgaagatcaggagtaaataatatggggattaaaacgcgggttacattcgcagcggcgatggcgatcgctgtcgccttcctcccgaaagtggaggacacgaaatacaaggtttataccgatatcgctggcgtttcgacggtctgcgaaggcatcacagggccggacgtaatcaaggggaaaacctatacccggtcagagtgtgatgcacttttggagaagcacatccaggtcgcaaagcgtgtggttgacagcaaaatcaaagtggccgtgccggacaccttccgggcgtcgatgtacagcttcactttcaacgcgggcggtggcgcatactccggcagcactatgctgaagttgacgaaccaggggcggctatatgaggcgtgcgaacagctttaccgctggacgtactatcgcaacccgaagacgggcaagatggaaaaatcgcgcggcctgcataatcgccgggatcaggaattcaatctttgcattaaggatctaaaatgagtagcttaaattttcagcgagcattggcaatcggcttcatcgtgtgggcggtcgcactggtttccggttgtgcttccagcgtcccgatcctttccgatctggtgggcagcaagccggatatgacggcgcaagtcggtgcggagaacgtgaaacaggcggttggcgtgacgaacaaaacggacacgtccagcaagcaggaaacgaccttcaaagaatcggcagttggcaaggttgacacttccaacaaaaaggcggtgacgacctccagcattcacgcgaaccagattacggcggagaagatcgagatccgaaacgacggtagcggaagtgtgattccgtggctgattggtgcagttggtgccatcatgttcgctgtcggtgttttcggtatgtggcgggaacgaaaaaataaaggggcgtaagccccttttttcatatgtaccgtttgacgtgcagcagcgccacgccatcttcatcattcaacccatgttcaaccttgtttgtcgcggccatgccttgatatagcaaggtgagcgcggcacgcaagtaattttctggtgtgatctgattcacgcaaacaagcctgtgaacctccgttatcagatcttccacctgctttcccgaatagggcttcatcgtcgagttgctcaatgtgcatcatctcccacatgtatttgttttccatcccttcaaacgaccggaagttaaatccaatctccctgttatccgggccagtgcaccacaccacgccgttttttccgtccaggtatccattcgtatagcttcgcgctaaaaactccttagaaaccattgaggcgaacatacggtgtgacacgttggcagcttttgccatgcgtggcgattcgcggtgcatgtaaacgaacttcgcaaaatcttgccgggtaaattcccggcgagactcgcagaatcggtaaatgtcaaggataaacattcattacctcatgaacgaaggattaacgaacacttccgaatcaatcacgcagacgaaacctaattcctccatcttcggcagcaatttttccttaatccttttactcaccccggactgacctttgaagatcttcagattgcggcacgcgttatagatgctctgaacagtcatcacgcctttcgactgcttgcaacggctggcgataacatcgtacacggccttaatctccgcaccctcaccagcgaagccggacgaatcagccgacgacaaatacgttttgctcaactcatgaaacatgatgatggcttcgtcgatcgtttcggttccgatcttcttcgagcgcttgccgccaggttgccagttgcggatagtgtggattaccgacgccaggcgcatcacctgcttatcgaatttacccatcgcaccgcgcagcatcgtatgcgaatacttcccgccgtcgcctaattccggctctaactcctggcgggccttgttcagccgacgcatgcctgcttcagtcacttccagcttgatatacgattcagtcataatgtcatgaatgaggcggaagtaatcagcgcgtaaagacttgtcgatcggctcataggtcgaattccctttttcgtcaatgaacacacgctcacccaaacgggtttgctcacgaaccaaaaggaagcgttcagataccccgatcccgcgagagccggcctgcataatggcgtcgatggtttcatcctgggcaattacgcaaatgcagcccaaagcctcgaatgacatattgttgctaacgtcggcacgagcgatcgatacgtggcctttatcccatgctttgagcaccagttcgctgttcgtcttcttaccgccatcgtttccatacgtgatccctaaaaggctgttaaccgccgtcgcctcatcggaaataacggcaaagtttccctgtcggttgttaatcttcgccagaccttccggggtggtatcagataccgggaaagttaggtcacacaatttttctaacttctcctcaagttcgtcacggtcttcaaaaagtttcaccatatcagattgcgataactccccttttagcgcctgcttgttggcggacagcttcgccatgattttcttacgctctttctttcgagactcgttaatgcgttcgacttcggcgacaataggatcgatggcaagcgagttaatggcagacttaccagcggaaggcggctgcgacgtgataacgtaaagcgttgtcggttgctcgctgccgtggtactcgacccaaaagcggcccatcatcgcggcggatacggttccgagaaagtgcatgtaagcggatgattccgggaactgaacagaacgcgctgcatttagcgccagcttgccgacaacatcataatcattggcgatcgagattgttggatacttatccgcgtttacgtcgatatctttgggctttggccagaatgaaacggagtcacgatacccgttcgcacgaatcgcaacgcgcaggggactgatcccctccctttctgcgatggcgataatatcttgcggtgatacgcggtcatttaaaaacatgcccttgctcctgattggttaatcgttcggctaatcatatgccgtattaaatccgagatccagtgataatctaaacacgcttgaaaaacgcgcttggattatcggggcgcatggccccgaacccgtcacaggtatttagcttcgaaagtcgttccgtccgatacactgaagccaacttcctcgcggtacagcgtccagcggcatccatcacgatcgaagatgtatccggcaaccgcgccgagcgcacgaccgctttctacctggtagcgcttgccgacgctgaaggattttttcatcgggttgctatggtcaaggccgacgcattttagcgttttggtttttagttcgatgaacgtcgcaatcacctggccaccagcgccagcaataaacaactcgccgctaacgcctaccgacaaaataacgcgcttcttcttcagttcgacgctgtcatataccatcattgacacattgccttcatcgtcgacgcgggcgggataaaggttattttcgtgtatattaatagcgcggcttgacgtgcatttaatcttgattgacttcgccatttattttctttctccgatctcgatgtacaggtttaccaaatccagaaagtcagccttgcttttgcaacccaacttaaagccaacgtgcgactcaattttattttgcatcgcagccagtgttgcgccgccattattcatcctgagaacttcgcggcatacttcggcgagcttttgagatatcatttcttcaccacctttatttccatgccttcgcaagcgctcttgatatcattaatcagacgattaagccttaaatcagtcattacatggtgatgacgtatatcaataattccagcaacgactaacagcatgacggcaaagataaaaccaccaggcccggacatacacaaaacagttaacatcatcaagataataaatttcatttccgttttactccgttgcgtttcgatggggtgattctacccgactttcgccgggtagttttagaaattcgtgctattctcgataattcgcctggaacacggcgcgggcaaaacctcgcggagtaatggaacgcagcattttagtcctttctgaccttccacccaaaaacttccaggcccaaaagaaattcacgccttctactccatccggcggcgtgagccgtttcggttcgacaaaaccgtttccgtgccatatgcacgttttcttcgtgtaattgtcacagtggggcattttgggatgccacacaggctcgttcggagaaacatagccaccgaagtcgcgcggatggaaataaaaatccggctttcgccatagtgacgataatttcccgaccgggttttcgaccatccaggggcaaccatacttattgcctaattgctcgaccatcttcgcatcccctgctgcggataatacgtcattatcttcccttacgtgcttgattccgctatgcgctaacagcgtgcatggcgggaaagcgaaaatgaagtcaggatctggaatgccgagaatcgatcgcttaacgtcaaaatccttgtcaatccaaatgttaacatactggatatttgggtgaaccattcgaatgctatattctccgtggtcgccggagtcggcgttgaaacagtacaccttgcatcccttgatggcccacggcaggcccatgatgccggagccgtcgaacatgcagtaaataaccttttctttcatgctttccacgcctcaatgaacattctgttcgattccagcgtcagcgtgacgccagccagggaggactgaatgagacgaccgcccggaaccgtcccgatgatgtagcggcctttcgacttcgtgatcgtgatctgagtgaagccggaggcgcggttcatgcggagaacgacgcggccatgagcgttcaggacggcgagaatggaatcagtcttcggatggttcattgtgtagctccttcgtttgttggtatggggacagtatgccactatcccgctgtgttgttttagcaaaacgtgctattccggaacgcaggtcgcgtaatcctggctgatgtagatcgtgcgctgaacgcgaggttcgagatcaccgagttcctggatggtaacatcgttgcttcctacccggcacggaaccgatccgaaaataaactcgccagtctgcttgtcgttgatttgccatacattaccgccttcctttttgacaaccaggaaaggcgcactgtctgcactgaactcttccgggccacgaccgtagtaatgcgtgatcgcagctttggccgcagcgctgaaggcatcggtaacgtcattggtcgccttgtctcggatggccttgatacgttcttcaggcgatccgatgatgtaggaaaagctgttcgaaatggtaactgttcgcattatattttaacctcgttttggtggatgaagtcggcgacgtaatggcattcgatcgggttctcgatacccgccagcacctcgcaagacccgttattcagtagctggcaatgctggcactccgcaccgccaacactggcaatgacaatggcgatcccgttgcatgaaccgccgaacattcgatgagggaagtggtaagcatcgcaggtgcaaaccacctccccggcccgccgtttcctcatacctggcccttctcgatgcagaaaacccaatcacgagcgtcaaccgcaaagcgtgcaacgccgtcgagcaccacgaagacagtaaacccgttgacgccgcgacccttctcgatatcggtcacggtgcggaacagatcgcttgcgccatattgaattttatccccgacgactacatccgcaaatgctttcatggttaatctcctgactggtttcgatgggttaactataccaggcctcgcggcccggcgtttagcaattcgtgcttatttcactgctttcttcgctgccttgtacgcctctttgaaagccggaacatcttcgaccggaatccagaagccggagccatagccatcgtcatagcaagggcattggtcgcagtagtcgccccaggttttctcttctccgccgacagagaatccagtgggcattttgcataacgcttcctcaaccgcttcgatcttgtcggcgtcgctatccatgataacgaagttccacttgccgttatactcgctgcccaggttgattgattcgcgttgaagtttcatagctttagcccctttggctcaattcgtttcgttgaagtcatcatagcaaagccgatcggatggattttaacaaaaaatgctattcctgcgattgctgattattccaccgattcggaatagtggaatagatggtgattgcacctgattccctggtgattagttttgacgaatcatgattgcttttgattgtttcattttgtgcaacgattttgtgagtgtttcaggatttgcaacgaattgcata

SEQ ID NO: 232 - DNA, 48653 bp, synthetic construct
  source 1..48653: mol_type = other DNA
tgtatgcaccatgcacgcaatttgccgatcgaagccagcaaaagcgccaggtgtttttcgccaacatttacgtcgtgtggaaatgtgggggaggaataatcttacctaaaaattgcgcaaaaagtgaccaacataagcctataatagatatataagtatatgataaataataatattattattattactctttatctatatatatgtttggtaagatttcttcggggaggttatggattcctcttgcgcaagccatagtttttagatgttccgccgcgaaaaaatgtatatagggatatataggggatgacagcaaatcttaccaaacacgcttaaacccttttacggcaaggcttgcgggtggtaagatgacattcccacacaagcaaaaacgacgtaaatgttggagaaaaacacatgcaatataaaggctatgagttcgaagaagtcgacgtgtccgagtggatgcagtacgacgcagataagcaggcagcttaccatgaatggctgcaatccatcacgtttggcggctcaccaggggtagacgatcggccagttgctgaaaagtcacccgccgcattcactggtaatcgttcgtccgagatccggcgcatgttcctggatggcgggcgacgtatccagatgacggcggaggagttcgcggataagttcggcgttcatccggtcgacaaccatttccgcaggccgttgctgaaactcctggagccgggagaagtgttgcgggtgagcctgggggcggggttgatctccgtctttaccgagttcgacgcaatgactggctcaaacatggaggctgaggcatacaggcggcagggcgctatctccgagagggaaaggattaagggtttagtggccgctcttgctgtagactttgccggacatgccctggccgggatttacaaggcgaacttgttcgcggctatcgatcttggattgaccgccagcgatatcagccaggaagcggccaccacgcaatagcactttttgttaaaacccggtcagagcgatcgggtattgtctttccatcgacaacgaaccgaggaaaacgaaatggtcactcttatcacatgggaacacgaaaacagcgagccagtggtgcgcgaattcgagaccgtagcggcatgttacaacctggcggcaaatggtggcttttacaaggcgcagatcgttaacgagttcggggttgttgattatgaattttaaggcgagcgacgtaaaacctggcgtggtctacggatcgcgcctcaataaccgcctttggcggtgggacggcgaaactatgtggactaaaggcgagggcgatgttatctggcatgaatgcggctggccataccccaccatgagccgcctcgatatcgcttattatctttcggttggcgatatgcacgagatggaagatagcactttttgctaaaactcgatcgggtcaatgcggtattattaccccatcaaaacagaggagcaaaaacatgattggcaaccacaacaacgaactgaacgcagcagaccaccgtcgcgccgtcgagcagaacttcaactcgcttaaagtagcctgcaatgagatgaaagcactgcttgaactgccgtcatgggatccacaactcgaagactactatgacggcctccgcgccaaacgtgacggtatcatcaaccgcctgcgcctggccgggatgttcctgtaaggagaacgcaatgattcacgaaattaagtctggcaagcaagtagtggcgaccataacgcagcgccacgttgtagccttccagattaacatccctggcaccttcgatatgcagtcgcttgacgtgccagtttgggccaacacagttgccattgatgccgacggctcgatttgggcctacgagtcgaccgccgaagatgtttgcatcccggactactcgcgcaaatcctgggttgattgcgggccttccgaaaacaagatgaggtcaattggggagatggattgcttccctgattgggagaaatcgaagattgacattcgcggtctgaaatagcacgcattgctaaacgcccagtcagaggaacgggcataatagccacataccaaacaacggagatttaccatgaagcagatcgtcaaaaacgcagttgtcgccatagtcggaaccaacttcgaaggcaagaaaagccgcattcaccttttgcacgttggcaatgatggcaaaattcgcggagctttccattacggcgagcgcggggagcaccttcacagtgacttgcattccgttatccagctaaccactttcaacgaatggcgaacccatcgggaatggctgccggaataccattacgagggtttgattgtcgaatagttcgttgccgacccaacgaaacttaccgcccgcgactataagcgcatggcacgcaaggcgcacaaactaatgaaacgcacgccagaagatcacgtctggcatgttttcgcaaatcagctttgaggtggctggatgatacgtttatcagacttcgatcgccactgcttaacagggcaattcggcgaaaagccagtaatgtgcaagatctcgaaggttaagggcgagccgtttgagcaaatcagaacgcttataagttttgccagacgaaaccgcctttacatccaggcacgcggcggactgttcgcaaagcaggttcattttgcgtatggaacagggttctacactggcggagacggtgttgacctatcgcctaaaagggttaggctgcgtgagataatcgaacgcggctacgtttggactaacgggatctactaatggaaacggtaaaagtaatttgcacgcacgctggctattcgccgctatcaacctatttcacacctggccgcgagtatgacgccaggttcggccctggccttgatgaagtgtggattttgcaggacgaccagggaaccactgaggacgaagaattttggcccgcctgccgtatgccggacgaaaagatcgccatgtacgccaataggccatacgaaaacaacgttttgtttgaggtgaaagtatgaaagtaagcaaaaagaaactcgcgctgtattgggccttcttcctggctggcctggccctgcatgacagcgtgggctggcagactatcggaatgctgtgcatgattattggcgtatgccgcctgtcggagattaacggattccgccggggatatcgggcagcattcagcggcgaaaaagaatagcactttttgttaaaactgccgtaacgtcatttgataaagtggcgttactgaagtgaacaatccaatcaggagcaacgcaatgaacgataatttaatcgcactgctggaagaactgaattcctacggctgcgcatacatcgagctttcgagcgagcaggttattgaagtcgcaatcgacgatgacgccgggtttaccagattaagggtggcggcaggggccgaagaggaattcgaagactgcggcatccgtgaagtaacaaaccttctcgaataccaccaggtgaaggagatccgctaatgaacaccgtcaaacttatggttgtcaatgcggcccgcgagcgtgagcgccaccttatcggctgcgtattcgatgccgtcgaggtgcacgaaccgctaggcacagtgcacgtaatccagggcggatacctgaacgaattcatcgtcaacccgctggacaccgacgaagatttgaccatccgtgttggtagcgagccggaaaacgcgcttttccacctgcggaaagtatcgaaggcgtcgcagcgcaagttgctggttcgcgcactgaagcgcattgcgaaggagcgcggttacaccgacgcatacatccgcaagttcggcacgttcgctggcgtaggcgattgggcgcggtcatgggccgacttttatttcaacaaatccggcgaattctgttccgtgcatacggactggctgcatggcacagaacacgatcccgtaaacggccacgagtggtacgaattcattgaggcggaattagacgccctttgatagcacgaattgctaaaacgaaagtccggggatggtgcatactatccccacactaacgaacaaaggaaattacccatgaacagcatgaaaattaacctgatcccgtccgacaacttcaccaaagacgacgacccgctgttagccgccgttattcgcgccgggatcggctgggcgcttagtgatgcctcgtgcgaatcatttatgcgtgaaccgttctcacgaatcgcggagcttgaaaagcaggttgctttcctgactggtgaacttcaggcggctatcgccacgatcgagaaggttcgggaaatcatgcgcaccgaacctggctatgacgttgaagatcacgcgcgagttttgcgcatgatggccgacgctttcgcaaagctccagcaatagcacgaaccacaaacacgaatcgtggttgctacatgtcaaccccatcaaagataaggaaaaacatcatgatttacgcaattattgccctggtggttcttattatggccctgtatgcgtgcggctgcttcctcatgcgggccttcctgaaatctgcggattctaccgacaaagaagatctttatcctgtgctttgctggccctggattacactttccgccgttggcagcgtgatcatttcccgcaattttaagtggtgaggcgatacatgaacatcaaaatgtggttcaacggatttacctacaacgtgcgctttcgcgggaagttctattactggtgtgatgagggcggcaagcgctggcggattcgcccacaccagaaaggcgcgagttatgagttaggcattgccgaggcgcaggggcgcgtcgagtgggttaagctgaaagtcatggatggcctgccaaatagcacgaattgctaaaaccgatcaggggtaagctggtatagttaccccatcgaaacgaaacggagttacagcaatgaaaatcaaaataaccaaaatcaacactcttaatggcgacggctcaattaccctggaagaatgcggcctcaaaatcggcgaagttcttgaggtcgacggccacttcaacgacggctcctactgtgtgattgctccgcgcaatagcgagtttatccaggctggtgacaatatcagcgtgagcgaagatgaatgcgaggttgtggaagaatgagcaacaaaatttgggttctaacctacaccattggaaccaacgaggggcgcaaatcgcgccgcctcatctgcgacaccaaagagcgggcgattaggcagcaaaccgttcttggtggcgaggttgtcgagtatctccgcaagcctgaagcgttcaaggtgaactggccggaaggcatggatatcaacggcgctttagcgagcctgcgtgagatgcagcacaacccgaagacgtggagcgaccttcaatgcctgcgggcagagccggaagtgaaggccgacccgttcaccaatattcgggcgcagcacgcggaatggtcggatcgccagttcggtaacgttgggccagttgggccgctcaagcacctggcgaaagaggcgatcgaggccgccgaagcgccggatgacattagcgagttcgccgatatcatcatgttggtatgggacgcaacgcgccgcgccggattcagtgatgagcagttggctgaagcggtggcggaaaagctggaacggaacaagcgtcgggcgtggggcgaggtcaaagatggcgagccttgccaccacgtgaaaaattaacgaaatcgaataccgtttaaagcgcctgtaagccattctggcgggcgcaaatttaaggagtgcgattgtatgcctgaatactcaaaagtcgaagatatgccgattggcgcaacgattacgggtatccgtatgagtgagtcggtcgacacaatcgagccgctggcgttcccggttacgcaggtggagacggacagcagaaaagggttcatcttcatctacaaaaatttcaatagtccgctgcgtgttgaagtgttcattgctcgcggaacctgggtagaatgggagaaggacaaatgttcggactgaatgaagcgcagtacaacgctgtgaagcgcatagcaaagcagatggccgcagaaacaaaagacgccatcaagaaggacaagaagacctacgatcaggtcgccgcgaagatgatcgataaacattgggcgcaaatcaacacgctggttactcgcggccagtttatctggatagctggctacctggaaggccgattcggtcgcagggatggcgagtatgaataaaaaacaggcaaacgaatcagcgacctattgacgtcctcgcgctgaccgggtaacttgaaccacgtagacacaagaggcggtaaacatccgcaagtctggccccgctttggggcatttacaaaaggggttgtgatgcagtacaagatcatgctcacagcaagaaaaatgggcggcttttgcaagtcctgcattcaagagtttagcatgacgattgaggcgaacgacaccgccgacgcggtggagaaagcaaaaaagcaatccggcgttaatctggatacgcataaaatcaacataaactacataagggaagtcaatcaatgttaactctgattattgcactgttaatgctgttcataggctatcatgttggcgcggctcatcttgtcgagcgcctttctaagcgggtacatgaaggcacgtttgctgccatgatgtacaataagaaaactgcacgttgggaaaaaattggcgatccggatggtatcgcaaagcgcataacgttttcgccgcttccgtatgttgactgcgagcctttcgtgaaactacagaagacgcttaatcggcgaaacaaactgatatgatacaacgacccgcttcggcgggtttttttatgcctgcaatctggtatactcgcaactcaacaaagaaggagggctaaaaatgtctgaagaacgtagaaagcgcgtaacgaaatcgcactttgagggaaacttcaaagcgctatatgaaaaggaatttggcgtcgtgctggggcgcacggcagaaatgacgccagaacaattttttgatatcgcaaagcgttacttccagtgggccgaagagaacgcaatcaaggcggcggaaacggcaacattccagggcgacgttaacgagtggggagtgaacaagcctcgcattttcacgatcacagggttaagcctgttttgcggcgtgaaccagtcaacgcttgggcgctatcgccacgacccgaactatgcgccagttatggagtttatcgactccgtaatctatgagcaaaaattccagcttgctgccgtcggcatgattaacgcttctttcgtcggtaaagagatggggatcgataagccgccagtgctgaacatcgacgctatcgccggggataagaacgagatcaccgaagagaaattagagaaagccgtgaccaatattcttgataagctgtaagggtaggctatgaacgaaatgatcatttgggaagacctgtcgccagccgataagctggcaattaaggcactgagtacgcgaaacttttcgctattcctgaaaatctggttccagatcattcagggcgaaaagctaatgtggaactggcatcactcctacttttgccacacggttgatgaaattatcgccgggaagcgcaagagcacgatcgttaacgttgcgccaggctccacaaagacggaggtgttttcaatccacctcgcgccgtatgcgtatctcaagtgccggaaggttcgaaaccttcagatctcgcagggtgacgccctgtcaaaaggcaactcggatcgcgtgattaagatcttctcatcaagcgagtggcaggagctatggccatcaaagttcgggcgcaagcagatcgatgaatttcaggtcatggacgataacgaccgcgtaaggcttgaaatggtctcccgttcgtccggcggccaaatcgtcggtaagcgtggcgggtacatgacgccgggattcagcggccttatcgcgctggatgatatcgacaaacccgatgacatgttctcgaaggtgaagcgtgagaaaaaccacgtactactgaaaaacaccattcgatcccgtcgagcgaagaagaagaagggcgacgaaacgccaatcctttccgtgcagcagcgattgcacgcgcaggatgccacctggttcatgatgagcggagggatggccatcgacttcgatcgcattgttattccggcgatggttacgcgggaatatggcgaatcgcttcctgactggttgcgtcctgagttcgaacgcgacgtgctttccggcccgtcggtggttattgacggcgtagaatactggtcattttgggaggacaacgaatcgatcgagaaccttgttgccttgcgcgaggccgatctttatacgttcctttcgcagtatcagcaggagccaatcgccctgggtggcaacgtgttcaagtcggagtggtggcgctattacggcgattccgacaaggcgcacgagccacgcccggacaagttcgaatatacgttcatcacggcggacaccgcgcagaaggtcaaggagctaaacgactactctgtaatgtgctattggggcaagtatcgggatcgcgtctacttcattgacggaattcgcggcaagtgggaagcgccagatctccgcgttcaggccgaagcattcatcaagcagtgctggcgtcggaacaaggagtgtgggaaccttcgccggatctacatcgaagacaaggcgagcggtacaggtctaatccaggatttaacaaaggcggtaaacggcatgggcgagatcgtcccggtgcagcgcgataaagataaggtcactcgcgctatggatgcacaaccaatcatcaagggggggcgtgtcgtgctgccggacaatcacccattcgttgcagagcttgaggcggagatgagcgcgtttacatatgacgattctcatccacacgatgatatttgcgacaacgtgtttgacgccgcaaacctggaaatgaacctgagcgacgatccggtagagcgaatgaaacgccttgcgggattgaaaaagctgggtcgctaatacataatgtgggcctgacggcccacacttaaacaaggttgaaatatgaataacattaagatggacgactataatcaaatctttaatggtggcgctggttatgcgtcaaccctcgcgtctatcgcggcaagatttggaacaatgtcgcaggttgaagagttctatcatgaaaacggcatggcgaagaaaatcgttgacgtgatcccggaagagatggtggctcccggcttccagctaaacggcatttcagataacaccaagtttcaatcagaatgggacgggttaaatctggagccgcaaatcaccgatgccctttgctgggcgcggctgtatggtggctcctacgtcctggcgatggttaacgatggtcgcgcattgacttcagcagcgaagcggggtaagccgctcgaatcgatcgttgtttacgaccacgattccgtttccgtcgcagaggaggaaaccagcccgcgaagcccacgattcggaaagcctaaaatgtacgaggtgaagccgctaaacggcgggcaaccgttcaaggtgcactatacccgtatgcactacatcgacggcgagcgagtaaccaacaaggtgcgcaagctaaataatggcgctggcggttcggtgctgaacaagtcaatcattgaagctattcttgactacgactattcggaatatctggcaacgcagctactgaagcgcaagcagcagggcgtttggaaggcgaaaggcctggcgctaatctgcgacgacaaagaaggcgagtacgccgcccgtttgcgcatggcgcaggttgacgctaattcaggcgtcggcaacacgatcggcattgatgctgacgacgaagaatacaccgtgattaactctgatatttcaggcatcccggaattcttgtccgctaaaatggatcggattgtcgccctgtcaggcattcacgagatcgtgctaaaaaacaaaaacactggtggcgtaagcgcaagccagaacacggcgctacagacgttctacaaactggttgaccgcaagcgcaatgacgattacaagccgctgttagaattcctgttacagttcatcgtaacggaggaggaatacagcgtcgagttcgaaccgttgtcgctgcctaccgatgcggagaaagcggatatcttccagaagaacgccaacgcggctcgcggcctcgttaccgaccaggttattgacgccaacgaagcgcgtgatactctgtcggcgttaattcctgaactgaagctaaaaggcaacgctccgaagcagaaaaaacttccggatcgcgccgctggttcaggcagcacgcaaagcgcagagatcttaaacaacacggaggcggatgatgaaagttaacggcagaatcccaaactggcgttatcctgaagcaagcgagcgggatttatcccgctccatgcaggacgcggtgacagaactcgtggtagaaatgcgggatcgcttagaccgcctgaaatttgacgccacggcggaggagatcagccaggcagaagacgatatcagcgaatcggccatcgtgttcttttccgccgtaattgcggcgctttcctccattgggttgactatctatagattcaattctaaacagtggcttgcaattgcgattgcggctggcgggcggaacaacgaatcagttatgcgccttaaagaattcggcgctggcgggtatgaagactggtatcaagattcgttgaggaagtgggaagataccgccgaagcgtcgatcaggaagttagcaagcgatatcgttgctgactggacgacgaaagttagaaccgccaacaacattggcaagtctcgccagcagatcgatgaaatcatcgaagggcgctacgcgatttatggtagctggtcgcgcaaccgggcaagcggaatcatcggaacttttaacagtatgttgatgatgcagcgcctaaaagatgctaaagtgtcgcattacttttggttcggcatgatggatgaccgcgagcgcgaaagccatatcaagctagaaggtaagcgacgccctgttaatggtgatggcattttccccggcgaggagtacggttgccgttgctgggcggttccgtcatttgataatgaggatgattgatggttaactttaatgattactttaatcacgtaggaaaggatctgatatggaagcgagcaacatcaaaccgagtaaaagttggtgatgttgccgggtggaaagatgagcatgggtatgtatacattagattcatgggcaaactgcgacaagctcaccggatcatttgggaaatgcaccacggcacaatacccgaaggaatggaaatcgatcatattaaccatgtaacggacgataacaggatcgagaatttaaggcttgtaaccagaaaggaaaactgtaaaaacgtatcaatgagcgtaacaaacaagagtggagttgtcggcgtgagttggtgcaagagaacaggtaaatggtttgcatccataagggttgataaaaaagagcgattcttaggtagatacgaagacaaaaacgaagccatttcagcaagagaggcggcagaggtaaaatacaatttccataaaaatcacggagataaaaaatgaaaagagttcaaaggttcgacacggtaaagatgaaggcccgatttgatgagaatggctttctggttgacactccgattgtggcgcgtatcggtgcgcaaacgtaccagacgccaaccgggccgcgagtcgagttccgcccgcgttctgaggtgtttgatgctgaatcgctggcttcataccagggaaagccgatcactttgggtcacaagatggttaacgcgcagaatgcgaaaggcctggttgttggctcgtgttccggcgctggcaaagaagaagggatcggggttctcgttccggtaatgatttacgacggcgaggcaatcgagcaagcgaagaagcgcgttgccgctgaattgtcggttggttacacttcggcagatatcgatcgtaagggttggggaaacaacgccactggcgaatatcacttcgatgatgaactaccggaaaacttcgaagagatgaaaaatgattccgtctctgattgggttcgctttgatgcggtgcaaacgaagattcgcgtgaatcacgtcgcgcttgttttccgtgggcgagcagggattgcgaaattaaatcttgatagcgaacaagaattcccctatgatgacgactcaaaccacaaaggagctaaaacaatgatcattaaaattgacggcgtagatgttgaagtggccgataacgtaggcgcttacattgccaaactagacgcgcaagttgcatcggcaaccagtcaggtaacgagcatcaccgcagagcgcgacgcacttcaaaccaaagttgatggcattgaagatgaagttgccgcccgcgttgctaaaatcaaagccgacgaagacgcaaaacagaaagttatcgcagttgtttctgccgctggcgtcaagtgtgacggcctggatgttaaggcaatgaaagttgcttacatcaaagaggtagacggtcgtgatctgtctgacaaagaagattcgtacatcgacgcttcttttgactttatcgccaactctgataagatggctggcaatcgctccaaagtcttcggcaaaaaagaagatggcgagcaaaaagacaaaggcggcttaccgaaacttgacggcaccgaaatcatcgatccgcaggcaaaattccgccgctaataatttgcggccttcgggccgctaccagaccaaataaacaggagattcaaaatggcacagattccagcttcttattcccgcaagcgtgatattgctgtagcggggcagatcgctgatacgtcactttacaatatcgacggaacttgtgttgctgaaggcgatatcaaagctggcgtactggtggcttccactggcgcagtttccaatggccacaaggtagttaaaccagcaaccgcagcgagcgacgtcattgtaggcatctcgcagttctcgcaagcctactcgcctgaaggcaagtatgacgatgagagcgcagttaacgttatgactcatggccgcatttgggcgatcgctgacgcaactgttactgaagaagattgcgcgttcggttctttcgtcacctttaccgcaaacggcacagtagcgaagggtgatgccggggttatcaaaactggctacaaacacactggcgaatacaccaaaaacgcagatggcactgttctggtgaaagtgcaggtgctttagggcgctgtagctccagcggctacaactggcgacgctggcgtataaaataaggggcttcggccccatttttgcaccagaaaaaaacctttgacggcttaacgattcgtgatattcttcatctcgttaagctaaatacacaaacaggagttttcagatgactatgaaattagatgcattcgaacagagtgccattaaggtcgcaatgcagggcatgggcattgatgccgcaaaactggatgcttacggtatctggactgttaagcagatgactcaattactgaatcgccagtatgagcaggcatacccgcagaccagcgcacttgagcttttcccggtaactaccgagatctcgccgaccgcccgccgctttgagtggctcgaattcgatggcgtaacttctgcgaaaattatcgccgattacaccgacgacctgccgaccgttgaagcgatggcgaaagagaagtcagggaaagttttccgcctgggtaacgcgtggtttatttccatcgacgaaattaaaactggcgcggcgctgggttccagcctgagcgatcgcaaggcaactctggcccgcgaaggtcatgagacgctcgttaatgatctggtgttcaaaggatccgctcctcacggcatcgttagcgttttcgaccatccgaacattaaccgcatgaccgccagcgcggcttggggcgatgacgcagcagcggctgaaaaggcattcgaagatctggaagacctgctaaacatgatcgaagaaactacgctgggccgccatcacgcgaccaacatcgtgattcctccgtctaagcgtcgtcttctgacgaaaaagatgcctgacactagcggcgactcttatctgacctggttcaccaagaaccacccgaacatcaccattacggcgatggcggagctggaagatattgacggcgcaggcaccaaaggcgtgctggcatacgaaaaagacccaatgaacatgagcatcgagatccctgagcggttcaacatgctgccgatgcagccgaaagacctgcatttcaaagttccgtgcacctccaaatgcactggtctcatcgtgtaccgcccgctgactattgcgattctcaccgggatttaatcaaaagcgccttcgggcgcttttttattgcattgcattctgcaatgtgctttaatttgaaacctaaagtaaaccaatggagcattaacaatggccagtaaaaaagaaaccgtagaaaccgtagaaaccgtcgaaaccgtagaaaccaccagtgccgaacaggcgtcgcaggttgttcaactacaaaacgttggtgcatgtgcaattcgctataaaggcaaaaattacgtctatgagcaggtttttgaagtgccggaaaacgaaatcgaccgattccgccacgaaatcttcaaaggccgggtcgaattctacgacaatccgaaacgcacgcgcgaatacatcgcagcggtgaaggcgaaagcgaaagagatcgtgcagcctaaaagcgcggaataacaaaaactaacaaagggcgcttcggcgtcctttttcatatcaggagagcgaccatgaattacacaattcaagatgtgatcgataaaatgcgcagccttgcacctccgcttaaagaagttccagatgaactgctgtctgcgtgggttgtgcttgccgaagagttcgtttgcaaatccaggttcggggattccatcgttacggcgatcgcattgatgaccatgcacctaatgtttttggatggagcgatgaagcaggaaggcgaaagcctggaatcttacacgcagcgagtggcatcgttcaccctgaccggggagttttcccaaaccttcgatcgcgtatcggcgtcaagcgacaacgaaatgctttctacgccgtggggcaaaatgtactggcgtatgctcaaaatgcgaggcggtggcttcggcctccttaccgccgggaacgtgcgccgctgcggaattggtaggtgatcgctatgaactacaaacaaatccaggcacgcgcaagcgcgggcattaagtttttcagtgacgctgacggcgtattcaacaagtacacgaaaggcgctggcggcggaatcgatccggaaaccggggaagatatcattcctggcgaggtggtaacgacaatcaagggcgcgatcagggatgtaaattaccgtgacattaacggcgaaaccatcctcgctggcgataagcgcgggtttttcactcatgatgtgccaatcatggagggtgacgaaatcgaagtagacggcgagcgctaccgcgtggttaatgcccgtccggtaaaaccaacgggaaccgttgttgcttaccgtccagttttgcgcagggtggcgacttatggctaattacacgatccgggagttcacaggggcaattgatgcatggtgtaaggccgctggtgatgcgctggaggacgttgtaaggtttacgtgtgaagatattcaccgcgacctcgtaatgcgttctccggtggatacagggcgcttccgtggtaactggcaaatcacctttaaccgcgccccgctttacgcgattaacgcatatgaccaaactggcgaaaagacaatccagaacggcaaagccaacattgcactatacgcaaaaggggctgggatcacttcgatctggttcagtaacatgctaatctatgcgaacgcgctggaatacggccattcaaagcaggctcccaatggtgttatgggagttgttgcgatccggttgggcgtttatgttactgaggcaatcaagcgagcgagggcgaaaaatgcattatgagatggcgttaaaatgcaaggcggcagtggctaaatttgccgccgagaacgggttaatggtcgcaggagataacgttgactttaagccaccaaaacacggtgaaacttatctcaagttctcctacgtagaagcggattccagatctgtcagcctttccagaacttgccgcgtttatctggctatggtgcagattgacgttgttttcaaacccgggatcggaaccgacgccgcgcggctaatcgcgcaaaacgttgcaaaatccttccccgaaggcaaggttgttgattctgaaagtaagttatatgtgagcgagtgggcggaagtgtaccgcgttcagaaacacgaaacaggctggctcctacccgttcgcttcacagtaagatgcgaaagcgcggaggagagcggttatccatcaacatgactggtcttagaggtgcttataatttcttgccagcctgtaaatatataggcataatggcgttgttaaactttcatcaaaacaggagtattcaacatgcatttaccaaacggtgcaaaggtcttctttgagaaggctcgcggtgcggccattccgtttaccgcaatgaccaacgacgcgaaaaacccaaaaatcacagtggcggacggcaagctgaaggtgaaagatattgtgatcttcaccgattgcacctggggcgacttcgttaacaaggtggctcgcgtaaaagcagtgacagcaggtgtggcaacgctggaagagttcgatacctccgacactaacaagtatccgggcggcgcggccactggtaacgtgagcgtgatcactgattgggtcgaattgccttgcattcaggatttaggcaaagacggcaacgaacagcagttctataactatcagtgccttggcgatgagcgcgagcaatcagaacctacttacaagtcggcggtgacgcttaactacacgtttgcgcacgattacagtaacgcgatctaccctgtgttgcgttcagccgacgccagcaagcaggcgagagcgatgtacatgtatatcccgcgagcttccgaggttcgttactggtctggaattgcatctttcgatgacattccttccacggctgttaacgagatggaaacggtaacgcttaacattgcgcttaaaggtgctcacgtcttccttccggttgtcgtgtaattaaatggcggggcttgtgcctcgcctttttttgtgcataatagcgaataacacaaaccaatcaggagttaacaaaatggctaaattcaaaattcaaattggcggcaacctcccttctttcaaactgcccgtaaccttcacttgcccggatggcaaagaagcgaccatcaccatgaccgtaaaacatcgctccaccgatgagatgaaagacttttatgagagcgaagataaagcgccaaagggtaacgccgagtttatccgctttatggccgaaggctgggatcttgatgatgagttcaacgacgaaaacatttcctggctttgcgctcacttcccggcgttcgtcatggcactgccacaaacttacatggccgcgcttgcgggccaccgtgcaaaagtttaaggcgggctgtttatctcacgcttcagcctgagctaaccgatcgccagcttgccgagtacgggttaaggcgatcggattatgaggcagatcttgaaacgatctactttgatgaacagaccgcccaaagctggcagctattccaggccatgcaaacgcagtggcgcattgggatgaacggcccaacggggcttgactataatacattgcctatgttcttcgaattgtataaaatcgacaatcgagaagcggcattacttgacttgcaaatccttgagggtgaatatctgaaggagatttacaagaaatcaaaataagcgcctacgggcgcttttttcatatgggggctaaacatggctgataaagtagctgggttgacgtttggcgttgacgtttcgcaggttgataaagcggtacgatcactagcagaactgaaaaaccaaagccagcaaacaggcgctggcctacagtcacttgcggacgctgaaaggcgggccacggcgcagaccgaggaaatgaaccgcgcgttgcagcgccagaagcaagagactgacaaatcaaaaaccagctttagcaggatcgcaagcgccatcgatccaacgatcgcaaaaatggccaacttgcgcaaagcgacggaagaacttgataaagcgtgggcgctgggtcttgttccggacaaggaatttttccgccttggcgctatcatcgagtctaccaccaaccaactccggcggcagcaggcggcgctaaccgaagaaggtcgcgcagcaatcgcagaggcggaggcaaagcagaaggcggcaaacgccgggcgtgattttgtcgccagtctgaaacagcaggctgactccatcgggaaaacacgcgccgaactgctggaaatgaaggcggcgcaattgggtgtatctgcggaagcggccccgttcattaatgccctgaagcagcaagagcaggcgttaaagaaacagcagaatgcgatgggcctggctggcatttctgccgggcaatataaaatggccatgcgccagttaccgatgcagatcacggatattgtaacttcccttgcgtcaggtatgccaatctggctggttgcggtgcagcagggcgggcaaatcaaggacagcttcggcggcttgagcaatacgtttaaggtattgttgagctacattaacccgctaacggttggtgctgcgtcgttgggtatcgccctggcggcaatcgctaaagctggttatgactcctggaaagcgcaacgagaactggcgaatgcgctggtgctgactggtggctatgctgcgaccaccaccgggcagatcacagccttaaccgaagagattaacaaaaactcatcggctacgattggcagcattcaggaaatcgcaacatcgctcgccagttctggtaagtacacaatcaaccagattaagcagatcacgaagactacggcggaatggtcggcgcagacgggtgagagcgagaagacgatcacagggtattttgattcgatcgcaaaagaccctgttaaggggcttgccgatctcaatgagcagtttaatttcctgaaagagggccagctaacctacatcgaatctttgcgtaaaaccaaaggcgagacggcagcagcagaggcggctacaaaactgtttgctgatactatggataagcgccttaaagatatcgcggacagcgcaacgccactcgaaacgatgtggacggatatcaaaaaatgggccgctgactcatggaaatgggtaggcgatcacacggtaggggcgctaaaccttatcgttgatacggtttccgcgatcattaacacgatcaggaagctgattgccgacggcgacgccatgatcgcgcagttcatcgttgacgctggccggaagctgcaaaaaattccaggaatgggcgactttggcaatgaatttctggcgcagcaggagcagctaatcaaggactcgaaagcgaaatccgacacgcttgcaaaaaccattgcggaacagcaggcaaggatcgcaaaaggcgaaatgggttacattgatgccgcgaaggataaaaccctttccggtgggtacagcagcaaaacgaaggatcgcgtaaatcaggaagaaaaagatatcctgaaaaaccgcaacgccaggaagcagcaggtagacgcgggcgttaaaattgatgagcagtatcaggctgaactgctatcgctacaggcgcagctaaaggttttgcagcagcacaaagggcttgacgacaagatcagccagcagcgcaaagactacttcgagacggttgctaaattccaggttttggaagaggcaagccagaagcgaaaactgacccaaagcgaacagcagatgctggcgaacaaaaagaatatcctgtacatggcggaacaaaaggccattgtgggagatcagattgttcagcagcagcgactgaacgccttgcttgacaagtctaccaagtatcaaaaccagatggcggagaagaccaaggcgctacaggataccgccggaatgggtagcaaggagcaggagagataccgggccaatgcgcagatggcggctgactggaaaaacaacggcggatctttaagtgaccctggatttaaagcgatgcaggccgcaagcgataaattctacgcacagcaagatgcgcaaatgatgaactggaaggccgggtttactaacgcgtgggctgacattggcgaagaagttaatgacgtatacaccaatatcggggatatcactaaaaacgcatttaacggcatggcgagcgtgctgactgattttgtcatgactggtaaggccagctttagcgacttcgcaaagagcgtgatcactgacattaccaacatgcttatcaagatggcgctgtttaactcgctttctgccgcgtttggtggtggtggaacgttcagcttcgccagcatgttcagcaaaggcttttctggcggcggttacactggcgacggcgggaagtatgagccaaaaggcgttgttcacggcggggaattcgtattcaccaaagaggcgacgcaaaggttaggcccggaaaacctgtaccgactaatgcgcggctatgcaagtggcggcctggttggtggtaacgcaagttccggatctggaatcaccaacggcggcaacgtcgcggcgtcggcggctatggtgtttaccattggtgatattaacatcacgatgggttccggtcaggatagcaaggggctagagcagggcgtaaggcagatcgtgaacgatatgttcaccgaggctttgagccaaaacgggcgcattgcgaagttcgtcaatgagaaaacgaggaggtagtagtggattcctttaaatggtgtacacaaatccaaggaggggcggcgaaagtcgccgtatccaataacgttcgggcgatcagcttcggaaatggctacatccaaactgcgtcgagcggcattaacacaaagcgccggactgttccgatcgtttatggcggttcggattgggaagcggtttataacttctgtcaggatcacgtaacaaagccttttgtgtggaaggcaccggatggaagaatgggcgtgttcgtcgtaactgccgactccgttaaccttgcgccgcagggtggcggggtgtttgaggtaacggctgaattcgccgaacgcttcacttcagccggataatcaaaaagcgccctttacgggtgcttttttttggcctatgatctggagtcaattagaggagggcttacgatgacagccaatgtttcaaaagattttgcgaactgcctacaaaaacttttccccggcgagatcctaacgctgatcgatatcgacgccacaaagttcggcgggcaggtctaccgattccataacgagaacgtcgcctatacaaccgaggagcttttggccgcggttaacggcgggacgcttcagccaaagatgatcacgtttcgcggcgagcagtacggcccgcgaccgttcggcctgggcgggatcgcaatgtcgagcgatggcacagtggaaaagccaacgctgacggttagcaatattgatgcgcaagcgagtgctcttattcgagcctataacggccttatgcaagccaaagttacggtatgggttttggtcaaggaattgctacaaaacgacggcagcgttaaagagggcgattttaggcgatttatttactacatcgagcgcccaaaacaggtcgacccgcaaaaggcaacgttcgaattaacatccgtgtttgatatggatggattaatgatcccggcccgtctgacgcaaaccgtttgctattgggcgcagcgtgggtggtacaagtctggcaaaggctgcgactacaacgggcagaacggatacttcgacaagttgggaaacagggttgaagacccgtcgcaagatgtttgtggcggcttggtttcttcttgcaggcttcgttttggcaatgaaccgttgagttttggcggttgtgcgacagcaacattgaaaagtggaaggtaatatgttaactccgaaaatcaaaatgcagatcatgcagcacgcgaaagaagtttacccgcatgagtgcgcaggtctggtgacgcaaaaatcacgagtgcaaaaatatcaccgactcgacaacgtttcgccagatcctgagaaagaatcaatgcctgatgaaacgcagtatgcgctggcatcaatggagggcgagccgatcgccttcgttcactcccacactggcgatggggcaaccacaattccgagcgccactgatttatgcttttgcgatgagtctggcttgtcgtgggttatcgtctccatcccggaaggtgatatgcgaatcattgagccgaaacgccgacctctgattggtcgcccctgggctttgggcgcttacgattgctatggcctaatcatggattttcacaagcgccacggcgtcacactaaaagatcggcgattgccgttcgaatggtggaagccggaatacaaagagaatctttaccaggattactggcaagaggacggattcattgaaaacactggcgagcctgaagttggcgatatgatcatcttccagattcaggcggaaaagtggaatcacgctggtatttacgttggaaacaataacatccttcatcacgcgtttggcaagctgtctcgcagggatatctattctggatggtacgagcagcacaaggttttaatttgcaggcacaaggagcttaaacatggcatcacatacaaagacgattaaactatccggttccctggggcgtcggttcggtgtcttccacaaacttgcggttgattcagtcgctgaatgcatccgggcgctgtcttaccaggttgaggggtttaagcctttcatgcagagcaaggttggtttaaatatgcgcttcggcgttgtcgccgacggaaaaccaatcagcgcgaacgaccttgcgacttttgccgtggcgagggagatcagaatcattccgatcccaaaagccagaaagaacggcgggttgttgcaggtcgttatcggagcggcgattatggttgcggccttctttactggcggcggctcgctggcggctatgggcgctttttcatcggctgcattcatggctggcggctcaatggttttgggtggcgtaatgcagatgatcgcaccgcagatgggcggcaatatgcgggcgagcgaatcgcctgagaataagccatcgtatgcgttcggcgggccgattaacaccacggcggcaggttatccaatccagttgccatacggttacagattggctggcggcgcattgttcggttctggatcttacgcagaagacaacaactaattaagccattcgctttttagcctgggggcgtagcctccgggctttttgtcgtgtacaattgcgagactattaacaggaggctaaacgatgactaatatcaaggcccgtaagggaggctcaagcaagccgcgtaccccggtagaaatgccagataacctgatctcaaaagacaagatcaagttattgctggctgtttctgatggcgaggtcgttaacgacttcagtttgaagcagttgcatttcggcggcgtcccggttcaaaacgaagatggaagttacaactatgaaggcgtgattgctgagtttcgccccggcacgcaaacacaggactacatccagggcttcagcgaatcaagtgctgagttccaggttgctcgtgaagtcactcacaacacgccttatacgcttaccgtatcgaacaaaaatctgtctgctattcgctttcgcctgttatggccgcgcgtgctgactcaaaaagataacggcgatatggtcggatcggttgttgagtacaagatcgagatggcggtagatggcgcaagttatcagacctacctaactggcaaaattgacggaaagaacacgactggcggttacgatcggagcattcgcgttaacctgccgcaaaacttcacgtcgcaggttcttatccgcgtgagccgagtaacgccggatgctgacggggtgaaggttgtcgatgccttccaggttcaatcctacgctgaggtcattgatgcaaaattccgctacccgttaacggccatgctttacgttgagttcgatagcgacctgttccagaaccagatcccaaccatctcactcaaaaagaaatggaaaattattcaggttccgagtaattacgatccgattaatcgcacatactccgggacgtgggacggtgtttttaagtgggcgtggagcaataacccggcatgggtgctttatgacctgatcatgaatcagcgctatggtttagaccagcgtgagttaggaatcccggttgataagtggtcgctgtatgaggtggcgcaatactgtgatgaacttgttcctgataatcgcggcgggatggaaccgcgctatttgatggatgtaattgttcaatcgcaggttgaggcgttccagttggtaagggatatttgttccgcgttccgtggaatgacgttctacaacggggaaagcctttcgattatcgtcgataagccgcgcgatccggtgtacctgtttacggctgataacgtcgttgatggcgttttcgttcggacgttcccaagcgaaaagacgatgtacacgtcgtgcaacgtcatgttcgacgacgaagaaaaccagtacgaacaggatgttgaaccagtattcaaccctgacgcagccatgcggttcggccacaacccgaccagcattacagcgatcggatgtaccagaaggacagaggcgaaccgccgtggtcgctggattctgcaaacgaacctaagcgccacaaccgtttcgttttctactggcctggaaggtatgattccttcttgcggcgatgtgatttacgttgcagatccgcattggcaatcggcctttaacctggtgctatcaggccgcgttatggaagtgtctggcgtgcaggtgttccttgcctaccgctgcgacgcgaaggctggcgacactctgatcctgaatacagacgacggcaagccagtgcgccgcacaatcgccagcgtttcggcggacggtaagaccatcacgctaaatgttgggtataactttgacgttgcgcctgacagcgtattcctgatcgagagcgatcagcttgcagcggaacagtatgtagtaacccggattgaaaagggtagtgatgacgacgaatttactttcgccatcacggctacgcagtacgatccgaacaagtatgacgcgatcgataacggggtaattaccgatggccgaccaacttcggttgtcgaccctgattcaatgggcgcaccgaaagacttaacgattagctctttctcccgcattgttcaggggatgagcgtcgagacgatggttatcggatggtctgccgtgcagtatgcaaaactgtacgaggtgcaatggcgcaaggacggtggtaactggaacaacgttccgcgcactgcgacaacgcaggttgatatcgaaggcatctatgctggcgagtatcaggcccgcgtgaggtgcattagcggtgggaatgtagcgtctccgtggtctgaattggcaaccgccacactgaccgggaaagtcggagcgccaaaaggcccgattaacctgtttgcgtcggacaatgagatcttcggcattcgagttaagtgggctatgccggaaggagcggaagacacggcatacattgagctttaccagtcgcaaagcggaaccgatcaggacgcaagcctgcttactctgattccttacccggcggctgaatactggcactcaattttgcccgctggctacgtgaacttctacaaagccagaagcgtagaccggatcggcaatgtttcagaatggactgattacgctcgcggcatgtcgtcgactgacgttaacatcatcacagatgcgatcctggatgaaatcctggatagcgacgcgatgaaggaactacaggaaaacgcacaggatagcgcggcaaaactcaatgactacgcgaacagcatcattcaaaatgcgctggcgaatgatgcggacgttaggaaaatgacgaaggagaacggtaagcgtaaggcagagatcgcgcataccacggtgctgattgccaacgaatcagaagcgagggcggctgaaattacgcaacttaaagcgcagattgatgaagatatcacgtcgcagattacgatccttaacgaagccctggcgacggaaagcgagacgagagcaacgcagattggtcagttgcaggcagattttgcggctgatattgacggcgtaaaaacaacaatgaacgctggttttacgcaggttaatcaggctattgcaaatgaaagtgacgcgcgtgcaagttccgaggcggcactagatgccaaaatcgggcagaactccgcagcgctaaaccagaaactcgactcgtgggcgaacgttaatggcgtcggttccatgtacacgatgaagttgggcttgaggtacaacggtcaggagtatagctccgggatggccctacagcttacctcaagtggtggaagcgttgtttcgcaggtgctgttcattgctgatagatttgctatcatccgtaatgcggcgtctggcgcgtacacgctaccgtttgttgtgcagaatgaccaagtgttcatgaataacgcgcttattcaggacggttcgattaccaacgcgaagatcggtaacgtcattcagtccaacaactttcaggagaatgttgcaggatggaggcttgataaaaacggcgtatttgtcaactatggctcaacttctggcgaaggttccatcaagcaaacgaaccagaacatcactgttcgagatggtagcgggcgcgttcgttgccagttgggtaggatcactggatcatggtaaaattaatgccgggagaaatcccggcttaaccaaaggaggcagacaatggcttatggttttcaatcatgggatgcgaacgggaaccccaacaactatgggatcgtccctgtttcagttgctggatatattgcattagcgcaaggccagaaaagcggaacgtggtattacaacgtcccgcctgggttgaggcttggtttcttttgggtcgcaaatcaagaccagtacggcacatcgaagaggcgaattaccgttagtggtaatcagatcgttgtttcagatgcgccagatgatgcgctggaatcaggcgtctacccggcgacgcaaggttttattgtcgttcaaattatgagttgatgattatggcagattacggaattttacttaccaatgatagcggcaatgtttgggtttcgcctcaaagcatcccactggcactactatcaaagcagagcatcactcttaggggtggtactaactccgatgaagtaagatcggtaacttacgacacgaatcacccatgcgttccgttcgtggtctttcatggatcttcgccacaaggtgcattcacaaaaatcaagtacagcggaaacacttgcagcgttgttttttcttttggtaagcaaaacgtatatgcggaggtttattttttctccgtgttcccacagccaaatcctggttatgggcttgcaatttgggatgaaaacggcacgctgattttgaccaatgaaaccagaacactttcagacgtacagacctacggcactggttttaatctaaacgtcactaacggcgggaagtgggcggttagtcctgttcagttaggcgcgatcgttggtgttgttcgcgatccctacccaagaccatttcagggcgactattgcgcagcggcattctttaacggctcaagcacgcaacttaccgcatatctaacgcaggcaccaggaggagccgccagcgatctaacctacgtcaatatgaaaaacacctgcatcgctattgattgcgcaagatacgactaaaagaaaggggccatacggcccctttttctaccccttgagatttttgatctcctcttttaattcatcaacttgagcagacagagctttgattgcgcaaattgcatccatcaaaagagcattattgtcaagcacaagtttcttattttcaactacgttaccctcatcatcctgataggatgcgctgctttctttaacgtagcacgaatcgatatctcgcacctgctgtgcaataactcccctacgctcgcgtttcttaacatcatccttataggtgaacttgaccagattcattgctttgatgttttcgagtgactgcaaaccatcataagcaacaacattgtctttgtagttaatgtcagatagaccagcaaaaacaacgttgccataagcagtgcttgcaatattaccatctgatttaaactgccaatactgcgtattaccgccagttccccatttgctgacctcaataacggcacgatgttcataacccctatgttcctcaagccacatagcgcaacgcgcaccgttaccattaatgttgaaccgtgagataaatgatggagatttaaggatatcaccattattcccatttggatcgctagttggccacgctacaaaagcatcattaacggtactcctcacagtcccatatgacacaacacttccgcgaagatcggcagccccgccaactcgcaacgtgctcgacattgtaacagcgccgcgaagatcggcagccccgtcagcacgcaacgtgcttgacattgtaacagcattgctaaagtttgcattcaacccggtaacagcaaagttcgatgcatcaaaaacaacctgcttcgcgctgttcatatctccattagggcggaagtacattccttgaccattttcagggattgagtacacgatcgcattgctgttatttgccctaatagtgcaaccgttcagggtcagcgtggcgtttcctccaggaacgctaattgcctgcggctggctgaacgtgttagctacgttggtgcgcgggatcgtattatcattagccatcaaatagtcagacggtgaattatatacaattccagaaggctccgtgtcaatccaggtataaccagtgcgatcaatgattggccccgtaatcgaccctttgttagcctgtacgtttacatgattcaaccacagttcaggaacccatccgccgggagcatgaatataaacatcaaacgaggagtctgtgtttttcaccaccccaagattaatgcgtctggtgtcgtttggtctggcagcaatcagggtgcgctgagtaaaccaagtgtcaatattattactggttagcgtatcgggaagaccgcggccagaaatcgaaaagatatcaaccgggagatttgcagtgccataaccagtacctccgccaatgatgaactgagcaaatgcgtagccatcaccagcgttcttgacgttggcgatcttcatccacttctccccagcgaaagtgccagtaattttatccggcacctggacgccagccacaaggtcgacaacctgatcacgaagattttgcgtctgccccttcgcagtttgcgcgtcgttcttcgccgagttggccgcagtttctgacgcttttgcattggtctccgaggttttggctgcggtttctgatgcctttgcattggtctccgagtttttggccgcagtttctgacgctttggcgttggtctctgaggtcttcgctgcggtttctgatgcctttgcgttagtctccgacgtcttcgcagcattcttggatgcagcagcattggtctctgaagtctttgcagcggtttctgatgcctttgcattggtctccgaggttttggccttattctccgaagatttagcgttcgtctctgaggtcttcgctgcggtttctgacgctttggcgttggtctctgaagtttttgcagcgctttcagacgcagccgcagccgtagcgcttgcgcccgcagcttcggaatctgccctcacctgatcggcaagactttgcagagcttcgaaatcgaagttcttaaagaagtcgacagcatccgcaatttgagtttcctgtgactggtagtagcgcagagtttccgcaacatcttgcgccagtccgtcaacggtcagcgagtcacttaacaggatcgcgtaatcgctagacgctacgacagcgccttttgtggtgatggctttaatttcagtatcgctaaccaccttgtttacgacggccatttgaattggtgacgacaaaaacataatcgtcgcaccagggcgaatcagcgaaagcgatgattgccattttgtgccagtcccggtaacggttccgtctgcggccatagccgctttgccttctctgtatagtgccatgtttttaagcctcattggttgattgagtaacgcagataatagcatcaatgaaccgataaaaaaaggagcctttcggctcctttagttgtcaaattagaacgggatatcatcatcgaaatccatccccgcattcccgccgctgttttgcggcttaggcgcttgttgcggcttgggttgttgaggctggccccacccggattgctgattgccgccgccgctttgcgaaggatcgcgctggctgaattcgagttgcggcataatcatttcgttgtggctgtaaattgtgccgttgtgctcgcggttaacgatctgaagcgtccggcaggttacgctgatcaccttatccatttgcagcgcttcgtcgtaccacttaatcatgttttcttttgcaaagaaaactgcgcggtagttcgtgtaaattgtttcgtcctcgccatcacgattgcggatcttcatccgctccgacaggtctacggcgtacattttccacggcccgttattgttgctgccctctttgacataaggcgcttttcggattacccctgttacaacatgcattgtcattcctatggggcggcttcccgcccgttaaattagttgaaagatgaaatatcttgcgcttctggttcaggttttgattctaccttttccggctcgcgcttcgcaacctcttgcggtttaccggggttaaatccgtttgccggggtgactttcagttctgcctggcgtttggtgatatcgtcttccgtcattttccactccgccggggttaacgtttgtttcgccagcttatagatctcacgaagcgattcgagatcttcgcacgcgtcaatgcgttttttgaagtctttcggtgtcattttcgtaatttctgcatcatcatccgcctgcttgatacctagcgctgcggccagcgcataacggcgggcgtaagatgttgttgagccgtatgcttgttcgacggttttactgatcggcatattgtactgaaacgccatgaactcgccgctttcatgcaaaaacatagtttcgaggtgcatcaccttttcggtgctcgtatccatcatggattgaatgaccataattttgttcttctccagcgccggggaaatagcgtcgaggatatccccaagattcgcataggtgttcccaagatggttgttcttaccgcttttctttgcggccacgaagccagattttgccttgattaatgcggctgcgatggtggtaaatttttcagatgtacgcatgataaagtttccttttcctaattggtaatgcgcactatatcacaagtgcgcaccagtgtttagctatttgtgccgtatacgtccgggaacatgtatttcacaaactgaggagtcggcaaaacaacttccgccgcgtttgactcatatgatggccatgaatcgtgcttcacgcattcagcatactgatgaatcacgctttgatactgtttgcgaccgatctcgatctgctggctggtcagggtgaacgccagcggagcaaacggtgattttttctcctgcgttagcagtctgacaactaccgggcgtttttcgttgtaagtcttcacgaacagatcgcgctgcaatgccatcttgagatagtagcccaagttgaaggcgagtcgcccgaaatcgtcaggcttggaagattgcgtggttttgtagtcggtaatcaccacgacctcgaaaacctcatccgggttgaacccccactccttgatgagttcgggatcggaaacaacgtcaacatgatcgagtcgaaccttaaccttgacgccgaagatctcaccgaagattgacaattcacgctgtgctgtaggcgattcgatacatgcggcgtgtcgcgggttagccagcatcacgctgcgcatttgaacaacggcatcgaaatcaacatccttaaccagcttgcgcccggagtttatcgcggcgctttcgtcgcacagttcaatagcccaccaaacatttacgtcaatcccggcgcgatatgccatttccagaagttccgggtaatccttgttggacgtcccaatcaggccacacgctttcagcttcgcagacagtgccgacttcgacgtaatcagatctttaacctcgcccggagaagtcgcccgcaggtactcgccattaaactttgccgtctcaagcatacaggtatgcgaacaggttccgaacgccagcgcggctgcttcctcacgcactttgaatttccagtgcgccggggatgttgcgtaaatctcgccgaggcttgagccgctaacgtattccgcgcaccaggagttaggatcgtggtaatcatcgttggataattccgcgttggtgtatgccttaaaaattgcttcagccattggtatcactccatttgtggtttcgttgcgttaagtatacgcatgacgattccaggcgcaagtcaaaaagtgctatccgcagttggttaaaaaacgagcgaaatttacgtaagatttagtaagatgcatcttacgtgatttttcctatatatttcatttagttaatgcaaatcggtaagatggtaatatccctataggtaaatatccatgaaaaatatggcgcgaaatccagcgaaaaaagacacgcaccccggagaaatcttaccaagattgatagatacagatagagtaataataataatattgttatttatcatatacttactatctatatattgcggttaattggttaaattttgcgcgaaatttacgtaagattcatcttactaaatcttacctaaagtggttcgaccagctgcaagccactgaatttcaggcataaaaaaaggtaagactgatttgctcaatcttacctaaattctggtcaacatttaatcatagaagcgacgatgccctgtacaacttgcgttcaaatccgagcttaaagttgtcaccgttcggaacgataactttaagatcccgatcgtcagcagccgccagcatatcccgatctccacgacggcaaactacccgcatttctcgcttaccttctccgccattgcctttatacctgtacgccacgatctcgacgtttgaaggtatgatgcaggcccaaacgtcgcacttgaacgaactggcaatattaaagtgcatcgcctcaatccaggatcgagcaaggtaaatcggcccgttaccgtcgtcgctctgattggtcactatcaccgatccgaatgtcagatcgccagccaacatcttctcccgaccctcctcatcaatgaacagcatgttgcaatactcatcatccggcccatcctcatgcactagttgcattggtagcgcgtgaattagctcctgtctgcagttctcgtgagtttttacgccaaccagatatgatttgatatgctcattttcaatgccctcatagagcgttacaggcgtgctatcgacggcctccgttctgtttaaaactgccatcactctttcatgatctgccatctttccgtagtcatacccgttatcacgagctacctgcttgtttctcttgactacgtattcttgcggaacctttccgagatagcgcccaagaatgttgatgcactcgctatacggctggccgcttaacttcattaaccagccgatccccttatcggcaccgcaaccgccacagtatgcgccgccatcacctcgcgtttccagcttgtcagtccagcggaatcggtctttgccgccgcagttcgggcagtcctggtgcttgccgttgaagtatcgagagtggatgccgcaaatgttctgcaacgcctcgcgccacatgccagccatgtacggcaaaacctctttttcatcgtaaaaatccacgtcgtaacccccaaataaaaaacgcctacacgagaatgataacccggcaggcgtttagtgtttagtcaaattgtgctatcggactacgcggagcatttcgcggcggtcgcatcggcgcgtcactggcttgccgttgctgtcaaatcttaaatcaggtcggcagaatgaggcgcgaaaacctttgcaattgttccgtcggtagctcttatgtactagataagcgccatcggctgagatcataccgcgcttacgccactgctgaacaacctggatactaactcccaactcttttgccgttccagcgataccaccgaaggcatcaataaccagctccatccgcgcagtcaacccagctcgaacctcatccttcagcacgtagtaaccagtcggtcgcttgcgtttcttcttatctttcccgcgcgacgttccgttgttgccgttcaaggttcgcttatcaaccattgccatttgctccataattcaaccctcatagcattttttgttaaacctgataaaatgttccatgtattatacacgcaactatgcgaatgacaaattaggattgacaatggcaagcacagaagaagacgtagcatattttaagcgactatttcgttatgaaggcggaacactgattcgcaaagttacaaccagtagtcgtgcattcgctggagactccgtagggtgcgagaacaacgttgggtatttacaggtaagcgtaaaaagcaaacccctatacgttcaccgaatcatttgggaaatgcataatgggcctatcccagaaggaatggagatagatcacatcaaccaggtcagaacagataacagaatcgaaaacctgcgactggtaagccaccaagtaaaccttaaaaaccaatcgatgaacagtggcaatactagcgggcacgctggcgtaagctggtttaagcgaggcggtaagtggagggcaacaataaaggttggcggaaggcaaatacacattggttacttcgcgtcgtttgagtcggcagttgccgcacgaaaagcagcagaaaaacaatatggttttcatgataaccacggagcagagaaaaagaaatgagcttatcgattgagcaacaaatagatctatacgcagacaaaatcccggcaatccaaaagagatttaccgttggaaatatcgttccgtatccatatcaggctgtggcttatattgagacagccaaaagaatagcaaactacaccgcaccgttttacattaaggcttcggtttccgccgggaaaaccatcatgatcgccatgctcgcagcgcagtgcaaggcaatgaacttacccatgatggttcttgctcgccaggccgagatcgtgaagcaggattccgaggagatcagtaacctcgacgttccaaactccgtttattgtgccgggttaggcacgaaggcggcatacttcccgatcgtcgtcggatctgaagggacggtggttaatggcctgtttaaaatgctgggcgactacgtgccttcagttctggctattgacgaatgccaccaggttgactggcaagatctggcggaagcgatcgccaacaatgaatcgttcgagtacatgagccgaccgaaggataagccgtatcgcgtgaacggggaactggtcgatgccgaccacccatacgacgaaaaattcgacgacgtagaattcggcggcggtcgcacgcagtacactatcgtcatttgtgagttaatgcggaggtgccttgagaagacagggcgagaacttcgcatcgttggctatactggttcggagtttcgcggcgtcattccgattttacaggaagacaagagccagcctggtttttggcgcgagcagatcaccgacattaacacaaactatcttgtcgagttcggatcggtggttccgacaatttttggtgatactgaatccgaagggttagggtatgacctatcagaattccacggttccagtcaggacggtacgcaggattttagcgcggaagaattgcgcaagatggaaaagaaaatccatgaatccggcgaaatgacgaagctgattatgcaaaaggtcgtggagcgtgcgaaaacccgaaacggagttctgataacttgcgctggacagcggcattgcaaggaggcggcgagctatctaccgccggacgcaacatacgcgatcatcaccgaaaagacgaactcaaagaaacgcggcgaaattttggataaggcgaatcgcggtgagatcaaatacatcttccaggtgatggccctaaccactggcgttaacgttccattttgggatttttctgtgatattgcgcaagatcgggtcgcttacgttgcttattcagcttttggggcgcggaatgcgacttctgaaggactggcaaaaacagccgccttactcgtgggtgaaagaagatcaccttgtctgggattttgccggaacaatggatgacctgggccagttgtatttcgatccgatcttggagcaggcgcaataccaaagacgcaagagcagcaagaacggcccgaaaatttgcccggtatgcaagggggaaaatagcgagtacgcccgcagatgcattcacaaagacagtaacggcaatcggtgcgaatacttctggatctcgcagaggtgcgaagaccagaaagacccgcgaacagggaagattaaaatcaaggggtgttacgctgaaaatgatattgttgcccgccaatgcagatgctgcggcgttcagcttaaagaccccaatgacaatctcaccgggaagcactatacgcagaatgactggtatgatgttgtctggttcgatatcggcttgactcgcaatcagtccgggatcatcttcaattacgtgttactgaaccatgacggcgagcgattcaccgcaagggaaaagttcttcccggaatcagagaatcagatttgcggcaagctgtggcggcaaaaggcagtcttccagcacgttagcgacgcggtaatgcgtggcaagttgggcggaatgaaaaacgcccgcaagatcctggagtatgcggaatacttccgcgcgccgaagcgcgtaacgcatcgcatcaacggcaagaaggaggacattatttcccgcaaagactttggaggcgaggagtgattacagacaaaggggattacctcgaatattacggcgggcctgtaaaggcttgcccacttgaaaaaatcgaccagatgaacagcgtttcgtggctgcgttacgaataccccgattatctgttctggcatacggttaacgagggtagcaagcacaaggcgagcgccgttgcagatcatcaaatgggattgcttaaaggcgtaagcgatatccttgtgctgattgggctgggcggaaaatacccgttcgccgccattgagctaaagcgccagggtaaatcccaggcatcgccagtgagcaaggagcaacgggaattcctcgccgccgtccgaagccgtggcgggttcgctgccgtggcctatggattcgagcagtttaagatcgcgtttgaagacgcaatcaaatagcactttttgttaaaactacccggcgcgagtcgggtattattctcccatcgaaacgaagaacggagtatttaaaatgaaaaagattattgctttaattgttctatctcttgttctcattggttgtagcgaaaaaccaaaaacatatatttgcggtaatgaatcgtttgaagttactagcgactatattaaggtggttcgcggtaatagcgctggcgttttaattgatggcattggtgaaaaccagtataagctggttacaccacttggaacggctttttatactgttaataaaaacaccattgatattaaagttagcgtttatcagaacactttaacttgcgaggttaagtaataatggcaaaagatatcacagacaaagacactcacgacgcgttcacgactttcgaacagcttgagcgtgaaacgttcataggcaacgcgcttgccactggcggacactatcaggccgtcaagcctgataaattctaccaggtaacgggcaaccgctacgccgggagcaagacgccggatatcgtccgcgacaagtggtcaaccgatcgcagccttattgcttacatggaggagcgttacgggccatacgacctggacgccgccgccgaagaaagcaacaccgtctgccctaagttttacgacgaaaagaccgattgcctcaagcgctggtgggggaaaaataagcacgtatggcttaatccgccttactcgttcccggatccctttgtgctgaaagccattgagcagatggagcatgacaaccagatcgatattttgcttcccggcgacaactctactgcgtggttccgcgacgcacagaaggcagcggctgagatcatttggattgtcgcagacgtcacggaggacgaagacggaacgcaactaagccgatccggtcgcctagccttcatcaacggcctaagcgggaaaccagtcgacaacaacaacaagggtagcgtgattttcatcatgcgcaaactcaagccgggcgaggagcaaaaaacgttctacgtcccggtaagcgaaatctgcccttcattaactaaaaagcgcatgcgcaaacgtgggatctgaaaaatggaacagcttgaatctttcaccgaatacctccacatcgtcgtcactctgctggacaagtacggcttcatcggtacggatgaagaaaagatggccttcgccgatagcatcgatggcacttatcaagaattcatggataacggcacgccgcttgctgactggcccgcgattcttgagcgcgaattgctggattttcgggcgcgtgaaggtgcggaatatttcgcgaaacagcactaattgttaaacaatgcccgccgcgagcgggtattattgttccatcaaccaatcaggagctaacgccatgaacaccaaaaccattgccgacaccatcaagatcgcacaagttaagccgcgcatcgtatctcgccacctgattaacctttctcgcctgtgcatggccgactacgtggcgaagcctttagagaatggccttgatggtgaaatcggtgcgatctacttccgcgccgcgcacggcatcgaagaaattcacatgtacgagcagatggcggaatgcttctgcatttacggtgacgaatgatgattgtagaatctggccgcgctgccgtatggcagcatgccaaagaggctggcattagtgacgatatcgtgatgatcgcaaagtatttcgatatcaaggatatctccattgtgttcaatgggaaatttacctatcttcatgagcgaccactgaagcgaacgcgtatagcggttgcgacgcgggcagaggccgacgcgctgaagatgttcattcacgaatctaagcagaccaaaaaatattacaagtagcgggagtgttgagaatgcgatatattgcgatcctgattacggcggtggttctcactatcgcaatcttcaactacgcaattcaattgggataaattatgcaacctaaaatcacagacgaagaatttttagccgcccgcgaggagggcaagacctaccgcgagatcgccgaagagttcggcatgaacgttcgcagtgttgagcgtcgcggcgttcgacttgcccgccaggggcatttgcacggtaacaatcacgtagcgaagcacatcccggacgggttcggggtcaaaggcacatcgaccatgattcgcgcgaacggtgatgaagttgtgcgctgggtcaagtcagaagtagaccgcgaccgcatgatcgctttgatggaggcggcgcaagcatcattctgcgaagacctacctcgcgctgaaccgcagcctaaggatgaatctaagttttttattgaggatcagctcgccctgtatccgatcttcgatttgcacatcggcgcgatggcccacaagcacgaatgcggcgagaactacgacaccagcacggcggaaagggttcttaaccgcttctttgactactccgtttcggttgccccgcagtcgaaaaagtcggtcttgctggtcggcggtgacttccttcacagtgacggcctggacgcagtaaccccggcaagtggtcacgttctcgatcaggatagccgttacgcgaaacttgtttatgtggctattcgctccttgcgccgagctgtgtcgctactgctgagtaatcacgaagaagtagaggtgcaggtaatcgaggggaaccacgatcaggctggcatgatctggttgcgtgcagcgctcgcagcgttctatgaaaatgagccgcgcgtattcgttgacgtcagccctgcaattatgcatcgtaccgtgtggggcaaaaccatgctgggctacacgcatggccacacgatgaagaagcctgaaacgcgccttgctgcgatggctaccgacttccgcaaggagttcggccagtgcgactacatttacacgcattccggccactggcatcaccagactgtaacggaacactcgttaggtattgacgaggtgcatggccagttaggggccaaagacgcttacgccgctcgcggtggttggcgctcctatcgccaggcggcggttattctgtacagcaaagaatatggcgaagtaggccgctttatctaccgcccgaacatgtaaccacaacggccccgcgaggggccaacaaggaaaaccgatgaatagaaatatctgcattttcgatctcgatggcacgttgtccaatggcaaccaccgcttgcacctgctgccgaaaaaggatctccaccttacagaaagttggagtgaatttaatggtgcatcaattggcgacagcccaatccaaagcacaattgatgtagcgaatgcgcttcatcgctccgggatgattgtcgttatcctgaccgggcgatccgatgaggtgaagaccgaaacaatgatttggcttgaccgttacggggtgaaatatgacaggctcatcatgcgtcgcgccagcgacaaccgtaaagacacggtaatcaaggaggaggagttacgcaaaatcggaattgatcgcattgttgcggcatgggatgattcacccaatgttattgcgcacttgcgcggcctgggtattacgacttaccaggtctgcgactacggagacaatcttcaagatcatttaaaatcgcacggagtagacaaatgaaaaatgtaattattctcaacggagcacccggaatcggaaaagataccatcgcggaaattatctcgcggaagtgggaatacaagaaccttagcttcaaacagcctatgtttgccatcgcgcgtgctgtgcttggatctactgattttgcacgctttaccgccagataccacgaccgcaagcacaaagaagtgaaatgcgattttttgggcgaccgttctccgcgtgaattcatgattcacattagcgaaaacttcgtcaagccgaccctgggcaaaaatcagttcggcaagttgctttgcgattcagcgctaacttcgccgtttaactgcatcgtcagcgacggcggttttgatgaggaggtcgagcacgtcgcagcgcatgaggcgcttaacgtatttgtcgtccgccttcatcgtgacggcatgacctttgagggtgatagccgcaaacacattcgacgacccgatctgatttgtgacacgtatcacgaacttgattttgatatgaccactggcgagcctgaagacgacgcgcaaaaaatccttgatatggtttcagatgttgcattaaaattataaagttaatgcctttattatcaccaccttaacgattgggaaccttgacgggttcccttttttttgttcttaattttgccaaatgaatatatcatcaccttaccatttaactaacagaggttgcatatcatgcgggaattcatcaacgcggcaaccaatagcagcggcggtgttgcccttgcgggatctgcatccgggcaattaatcattgctgccattggtttatttttcatgatcttatttggctcaatcggcacgtggctgaagtggaaagactcaaaagccatccgggaggcgattgattctggcgacattaaagaggcattgaggatcaggagcaaataaaatgggaatgaaaacgcggcttactttcgcggcggcggtggcgatcgcggtcgcgttcctccccgaagtggaggacactaaatacacggtttatacggatatcgctggcgtaccaactgtatgcgaaggaatcacaggcccggacgttatcaaggggaaaacctatacccggtcagagtgcgacgcgcttttaaccaagcatatccaggtagcaaagcgaaccgttgacagcaaaatcaaagtagatgttcctgacaccttcagggcgtcgatgtacagcttcacgttcaacgctggcggcggcgcatattctggcagcaccatgctgaaattaacgaaccagggccgattgcgcgaggcgtgcgagcagctatatcgctggacgtactaccgcaacccgaaaacgggtaagatggagaagtcaaaaggcttgcataatcgccgggttcaggaatatcaactatgcattaaggatctaaaatgattaaggtaattggtgtggctcttacggttgttcttctgtctggttgcgcttccagtgtcccgatcctttccgatctggtgggcagcaagccggatatgacggcgcaagtaggcgcggagaacgttaaacaggcggttggcgtgacgaacaaaacggacacgtcaagcaagcaggagactacgttcaaagagtcggcggtaggaaaggttgacacgtcgaacaaaaaatccgtaacgacctccagcattcacgccaaccagatcacggcggacaagatcgagatccgaaacgatgaaagcggaagcctgactccgtggctgattggtggtgttggggttgtaatgctggcgataggtgcgttcggtctttggcgggaacgaaaaaacaaaggggcgtaatgcccctttttctatatgtaccgcttgacgtgcaatagcgctactccgtcttcatcgttaagaccatgttcaaccgtgttggttgcagccattccttgatagagcaagatgagcgcggcacgcaagtaattttctggtgtgatctgtttcacacaaacaagcctgtgaacttccgttatcagatcttccacctggtttcccgaaaagctgttcatcactgagttggtcaaggtgcatcatctcccatatgtatcggttatccatcccttcgaacgaccggaaatcaaaacctatttccctgttatccggccccgtacaccacacagagccgttttttccgtcaaggtatccattcgtatagcttcgcgctaaaaactccttagagaccattgaggcgaacatacgttgcgatacgttggcggcttttgccagtcgaggcgcttcgcggtgcgtatagacgaacttcgcaaaatcctgccgggtgaactcccggcgagattcgcagaacttgtaaatgtcaagaataaacatcaattacctcatgaacgacgggttgataaagacttcggaatccatcacgcagataaagcctaattcctccatcttcggcaataagcgttccttaatctttttgctcaccccggcctggcctttgaagatcttcaggttgcggcaggcgttataaatgccctggacggtcataacaccttttgcctgtttgcagcgactggcgataacgtcatacatcgctttaatttccgctccctcaccagcaaagccggaagagtcagccgacgacaaatacgttttgctcaattcatggaacataatgatcgcttcgtcaatggtcgccgtgtcgatcttcttcgagcgcttcccgccgggttgccagttccggatcgtgtgaatcacggacgccagacgcataacctgcttatcaaacttacccatcgcgccgcgaagcattgtatgcgaatacttgccgccgtcgcctaactccggttctaactcctggcgggccttgttcagcctacgcattgccgcgtcagtaacctgcaacttaatgttcgactcgctcataatgtcatgaatcagccggaagtaatccgccttcagtgactggtcgatcggctcataggtcgaattcccgttttcgtcgatgaacacgcgttcacccaaacgggtttgctcacgaaccaaaaggaagcgttcagataccccgatcccgcgagagccggcctgcataatggcgtcgatggtttcatcctgggcaattacgcaaatgcagcccaaagcctcgaatgacatattgttgctaacgtcggcacgagcgatcgatacgtggcctttatcccatgctttgagcaccagttcgctgttcgtcttcttaccgccatcgtttccatacgtgatccctaaaaggctgttaaccgccgtcgcctcatcggaaataacggcaaagtttccctgtcggttgttaatcttcgccagaccttccggggtggtatcagataccgggaaagttaggtcacacaatttttctaacttctcctcaagttcgtcacggtcttcaaaaagtttcaccatatcagattgcgataactccccttttagcgcctgcttgttggcggacagcttcgccatgattttcttacgctctttctttcgagactcgttaatgcgttcgacttcggcgacaataggatcgatggcaagcgagttaatggcagacttaccagcggaaggcggctgcgacgtgataacgtaaagcgttgtcggttgctcgctgccgtggtactcgacccaaaagcggcccatcatcgcggcggatacggttccgagaaagtgcatgtaagcggatgattccgggaactgaacagaacgcgctgcatttagcgccagcttgccgacaacatcataatcattggcgatcgagattgttggatacttatccgcgtttacgtcgatatctttgggctttggccagaatgaaacggagtcacgatacccgttcgcacgaatcgcaacgcgcaggggactgatcccctccctttctgcgatggcgataatatcttgcggtgatacgcggtcatttaaaaacatgcccttgctcctgattggttaatcgttcggctaatcatatgccgtattaaatccgagatccagtgataatctaaacacgcttgaaaaacgcgcttggattatcggggcgcatggccccgaacccgtcacaggtatttagcttcgaaagtcgttccgtccgatacactgaagccaacttcctcgcggtacagcgtccagcggcatccatcacgatcgaagatgtatccggcaaccgcgccgagcgcacgaccgctttctacctggtagcgcttgccgacgctgaaggattttttcatcgggttgctatggtcaaggccgacgcattttagcgttttggtttttagttcgatgaacgtcgcaatcacctggccaccagcgccagcaataaacaactcgccgctaacgcctaccgacaaaataacgcgcttcttcttcagttcgacgctgtcatataccatcattgacacattgccttcatcgtcgacgcgggcgggataaaggttattttcgtgtatattaatagcgcggcttgacgtgcatttaatcttgattgacttcgccatttattttctttctccgatctcgatgtacaggtttaccaaatccagaaagtcagccttgcttttgcaacccaacttaaagccaacgtgcgactcaattttattttgcatcgcagccagtgttgcgccgccattattcatcctgagaacttcgcggcatacttcggcgagcttttgagatatcatttcttcaccacctttatttccatgccttcgcaagcgctcttgatatcattaatcagacgattaagccttaaatcagtcattacatggtgatgacgtatatcaataattccagcaacgactaacagcatgacggcaaagataaaaccaccaggcccggacatacacaaaacagttaacatcatcaagataataaatttcatttccgttttactccgttgcgtttcgatggggtgattctacccgactttcgccgggtagttttagaaattcgtgctattctcgataattcgcctggaacacggcgcgggcaaaacctcgcggagtaatggaacgcagcattttagtcctttctgaccttccacccaaaaacttccaggcccaaaagaaattcacgccttctactccatccggcggcgtgagccgtttcggttcgacaaaaccgtttccgtgccatatgcacgttttcttcgtgtaattgtcacagtggggcattttgggatgccacacaggctcgttcggagaaacatagccaccgaagtcgcgcggatggaaataaaaatccggctttcgccatagtgacgataatttcccgaccgggttttcgaccatccaggggcaaccatacttattgcctaattgctcgaccatcttcgcatcccctgctgcggataatacgtcattatcttcccttacgtgcttgattccgctatgcgctaacagcgtgcatggcgggaaagcgaaaatgaagtcaggatctggaatgccgagaatcgatcgcttaacgtcaaaatccttgtcaatccaaatgttaacatactggatatttgggtgaaccattcgaatgctatattctccgtggtcgccggagtcggcgttgaaacagtacaccttgcatcccttgatggcccacggcaggcccatgatgccggagccgtcgaacatgcagtaaataaccttttctttcatgctttccacgcctcaatgaacattctgttcgattccagcgtcagcgtgacgccagccagggaggactgaatgagacgaccgcccggaaccgtcccgatgatgtagcggcctttcgacttcgtgatcgtgatctgagtgaagccggaggcgcggttcatgcggagaacgacgcggccatgagcgttcaggacggcgagaatggaatcagtcttcggatggttcattgtgtagctccttcgtttgttggtatggggacagtatgccactatcccgctgtgttgttttagcaaaacgtgctattccggaacgcaggtcgcgtaatcctggctgatgtagatcgtgcgctgaacgcgaggttcgagatcaccgagttcctggatggtaacatcgttgcttcctacccggcacggaaccgatccgaaaataaactcgccagtctgcttgtcgttgatttgccatacattaccgccttcctttttgacaaccaggaaaggcgcactgtctgcactgaactcttccgggccacgaccgtagtaatgcgtgatcgcagctttggccgcagcgctgaaggcatcggtaacgtcattggtcgccttgtctcggatggccttgatacgttcttcaggcgatccgatgatgtaggaaaagctgttcgaaatggtaactgttcgcattatattttaacctcgttttggtggatgaagtcggcgacgtaatggcattcgatcgggttctcgatacccgccagcacctcgcaagacccgttattcagtagctggcaatgctggcactccgcaccgccaacactggcaatgacaatggcgatcccgttgcatgaaccgccgaacattcgatgagggaagtggtaagcatcgcaggtgcaaaccacctccccggcccgccgtttcctcatacctggcccttctcgatgcagaaaacccaatcacgagcgtcaaccgcaaagcgtgcaacgccgtcgagcaccacgaagacagtaaacccgttgacgccgcgacccttctcgatatcggtcacggtgcggaacagatcgcttgcgccatattgaattttatccccgacgactacatccgcaaatgctttcatggttaatctcctgactggtttcgatgggttaactataccaggcctcgcggcccggcgtttagcaattcgtgcttatttcactgctttcttcgctgccttgtacgcctctttgaaagccggaacatcttcgaccggaatccagaagccggagccatagccatcgtcatagcaagggcattggtcgcagtagtcgccccaggttttctcttctccgccgacagagaatccagtgggcattttgcataacgcttcctcaaccgcttcgatcttgtcggcgtcgctatccatgataacgaagttccacttgccgttatactcgctgcccaggttgattgattcgcgttgaagtttcatagctttagcccctttggctcaattcgtttcgttgaagtcatcatagcaaagccgatcggatggattttaacaaaaaatgctattcctgcgattgctgattattccaccgattcggaatagtggaatagatggtgattgcacctgattccctggtgattagttttgacgaatcatgattgcttttgattgtttcattttgtgcaacgattttgtgagtgtttcaggatttgcaacgaattgcataaa

SEQ ID NO: 233 - DNA, 49125 bp, synthetic construct
  source 1..49125: mol_type = other DNA
ggggatgacagcaaatcttaccaaacacgcttaaacccttttacggcaaggcttgcgggtggtaagatgacattcccacacaagcaaaaacgacgtaaatgttggagaaaaacacatgcaatataaaggctatgagttcgaagaagtcgacgtgtccgagtggatgcagtacgacgcagataagcaggcagcttaccatgaatggctgcaatccatcacgtttggcggctcaccaggggtagacgatcggccagttgctgaaaagtcacccgccgcattcactggtaatcgttcgtccgagatccggcgcatgttcctggatggcgggcgacgtatccagatgacggcggaggagttcgcggataagttcggcgttcatccggtcgacaaccatttccgcaggccgttgctgaaactcctggagccgggagaagtgttgcgggtgagcctgggggcggggttgatctccgtctttaccgagttcgacgcaatgactggctcaaacatggaggctgaggcatacaggcggcagggcgctatctccgagagggaaaggattaagggtttagtggccgctcttgctgtagactttgccggacatgccctggccgggatttacaaggcgaacttgttcgcggctatcgatcttggattgaccgccagcgatatcagccaggaagcggccaccacgcaatagcactttttgttaaaacccggtcagagcgatcgggtattgtctttccatcgacaacgaaccgaggaaaacgaaatggtcactcttatcacatgggaacacgaaaacagcgagccagtggtgcgcgaattcgagaccgtagcggcatgttacaacctggcggcaaatggtggcttttacaaggcgcagatcgttaacgagttcggggttgttgattatgaattttaaggcgagcgacgtaaaacctggcgtggtctacggatcgcgcctcaataaccgcctttggcggtgggacggcgaaactatgtggactaaaggcgagggcgatgttatctggcatgaatgcggctggccataccccaccatgagccgcctcgatatcgcttattatctttcggttggcgatatgcacgagatggaagatagcactttttgctaaaacactgctgtcgagatccggtattatttattcatcgacaacaaagaggagatgaaaatgagcaagaagaatccatattcaaccagcaactaccataacgaacacgtcatgcgctggcactagcagaaactcaaagaacgccaccttgcacgccatggcaaataatcacaatagcgccgcttcggtggcgctgtatcccaaccataaaaacggcttacaccaggaggattggccatgccacgattttcagcaacaacaaaacttcgcaccttcgccgggatgccgatcccatactcatcaaccaaagccgtccagggcagcgagcacggcgtatacttccactggcagggcaagtggcgtttcaccgtcattcgcggcttttacgtgacctgcgatcgcgtggatatcgagaaccattccggcgggaacaaggttcacgagttcaaaaagcacgaatagcactttttgctaaaactcgatcgggtcaatgcggtattattaccccatcaaaacagaggagcaaaaacatgattggcaaccacaacaacgaactgaacgcagcaggccaccgtcgcgccgtcgagcagaacttcaactcgcttaaagtagcctgcaatgagatgaaagcactgcttgaactgccgtcatgggatccacaactcgaagactactatgacggcctccgcgccaaacgtgacggtatcatcaaccgcctgcgcctggccgggatgttcctgtaaggagaacgcaatgattcacgaaattaagtctggcaagcaagtagtggcgaccataacgcagcgccacgttgtagccttccagattaacatccctggcaccttcgatatgcagtcgcttgacgtgccagtttgggccaacacagttgccattgatgccgacggctcgatttgggcctacgagtcgaccgccgaagatgtttgcatcccggactactcgcgcaaatcctgggttgattgcgggccttccgaaaacaagatgaggtcaattggggagatggattgcttccctgattgggagaaatcgaagattgacattcgcggtctgaaatagcacgcattgctaaacgcccagtcagaggaacgggcataatagccacataccaaacaacggagatttaccatgaagcagatcgtcaaaaacgcagttgtcgccatagtcggaaccaacttcgaaggcaagaaaagccgcattcaccttttgcacgttggcaatgatggcaaaattcgcggagctttccattacggcgagcgcggggagcaccttcacagtgacttgcattccgttatccagctaaccactttcaacgaatggcgaacccatcgggaatggctgccggaataccattacgagggtttgattgtcgaatagttcgttgccgacccaacgaaacttaccgcccgcgactataagcgcatggcacgcaaggcgcacaaactaatgaaacgcacgccagaagatcacgtctggcatgttttcgcaaatcagctttgaggtggctggatgatacgtttatcagacttcgatcgccactgcttaacagggcaattcggcgaaaagccagtaatgtgcaagatctcgaaggttaagggcgagccgtttgagcaaatcagaacgcttataagttttgccagacgaaaccgcctttacatccaggcacgcggcggactgttcgcaaagcaggttcattttgcgtatggaacagggttctacactggcggagacggtgttgacctatcgcctaaaagggttaggctgcgtgagataatcgaacgcggctacgtttggactaacgggatctactaatggaaacggtaaaagtaatttgcacgcacgctggctattcgccgctatcaacctatttcacacctggccgcgagtatgacgccaggttcggccctggccttgatgaagtgtggattttgcaggacgaccagggaaccactgaggacgaagaattttggcccgcctgccgtatgccggacgaaaagatcgccatgtacgccaataggccatacgaaaacaacgttttgtttgaggtgaaagtatgaaagtaagcaaaaagaaactcgcgctgtattgggccttcttcctggctggcctggccctgcatgacagcgtgggctggcagactatcggaatgctgtgcatgattattggcgtatgccgcctgtcggagattaacggattccgccggggatatcgggcagcattcagcggcgaaaaagaatagcactttttgttaaaactgccgtaacgtcatttgataaagtggcgttactgaagtgaacaatccaatcaggagcaacgcaatgaacgataatttaatcgcactgctggaagaactgaattcctacggctgcgcatacatcgagctttcgagcgagcaggttattgaagtcgcaatcgacgatgacgccgggtttaccagattaagggtggcggcaggggccgaagaggaattcgaagactgcggcatccgtgaagtaacaaaccttctcgaataccaccaggtgaaggagatccgctaatgaacaccgtcaaacttatggttgtcaatgcggcccgcgagcgtgagcgccaccttatcggctgcgtattcgatgccgtcgaggtgcacgaaccgctaggcacagtgcacgtaatccagggcggatacctgaacgaattcatcgtcaacccgctggacaccgacgaagatttgaccatccgtgttggtagcgagccggaaaacgcgcttttccacctgcggaaagtatcgaaggcgtcgcagcgcaagttgctggttcgcgcactgaagcgcattgcgaaggagcgcggttacaccgacgcatacatccgcaagttcggcacgttcgctggcgtaggcgattgggcgcggtcatgggccgacttttatttcaacaaatccggcgaattctgttccgtgcatacggactggctgcatggcacagaacacgatcccgtaaacggccacgagtggtacgaattcattgaggcggaattagacgccctttgatagcacgaattgctaaaacgaaagtccggggatggtgcatactatccccacactaacgaacaaaggaaattacccatgaacagcatgaaaattaacctgatcccgtccgacaacttcaccaaagacgacgacccgctgttagccgccgttattcgcgccgggatcggctgggcgcttagtgatgcctcgtgcgaatcatttatgcgtgaaccgttctcacgaatcgcggagcttgaaaagcaggttgctttcctgactggtgaacttcaggcggctatcgccacgatcgagaaggttcgggaaatcatgcgcaccgaacctggctatgacgttgaagatcacgcgcgagttttgcgcatgatggccgacgctttcgcaaagctccagcaatagcacgaaccacaaacacgaatcgtggttgctacatgtcaaccccatcaaagataaggaaaaacatcatgatttacgcaattattgccctggtggttcttattatggccctgtatgcgtgcggctgcttcctcatgcgggccttcctgaaatctgcggattctaccgacaaagaagatctttatcctgtgctttgctggccctggattacactttccgccgttggcagcgtgatcatttcccgcaattttaagtggtgaggcgatacatgaacatcaaaatgtggttcaacggatttacctacaacgtgcgctttcgcgggaagttctattactggtgtgatgagggcggcaagcgctggcggattcgcccacaccagaaaggcgcgagttatgagttaggcattgccgaggcgcaggggcgcgtcgagtgggttaagctgaaagtcatggatggcctgccaaatagcacgaattgctaaaaccgatcaggggtaagctggtatagttaccccatcgaaacgaaacggagttacagcaatgaaaatcaaaataaccaaaatcaacactcttaatggcgacggctcaattaccctggaagaatgcggcctcaaaatcggcgaagttcttgaggtcgacggccacttcaacgacggctcctactgtgtgattgctccgcgcaatagcgagtttatccaggctggtgacaatatcagcgtgagcgaagatgaatgcgaggttgtggaagaatgagcaacaaaatttgggttctaacctacaccattggaaccaacgaggggcgcaaatcgcgccgcctcatctgcgacaccaaagagcgggcgattaggcagcaaaccgttcttggtggcgaggttgtcgagtatctccgcaagcctgaagcgttcaaggtgaactggccggaaggcatggatatcaacggcgctttagcgagcctgcgtgagatgcagcacaacccgaagacgtggagcgaccttcaatgcctgcgggcagagccggaagtgaaggccgacccgttcaccaatattcgggcgcagcacgcggaatggtcggatcgccagttcggtaacgttgggccagttgggccgctcaagcacctggcgaaagaggcgatcgaggccgccgaagcgccggatgacattagcgagttcgccgatatcatcatgttggtatgggacgcaacgcgccgcgccggattcagtgatgagcagttggctgaagcggtggcggaaaagctggaacggaacaagcgtcgggcgtggggcgaggtcaaagatggcgagccttgccaccacgtgaaaaattaacgaaatcgaataccgtttaaagcgcctgtaagccattctggcgggcgcaaatttaaggagtgcgattgtatgcctgaatactcaaaagtcgaagatatgccgattggcgcaacgattacgggtatccgtatgagtgagtcggtcgacacaatcgagccgctggcgttcccggttacgcaggtggagacggacagcagaaaagggttcatcttcatctacaaaaatttcaatagtccgctgcgtgttgaagtgttcattgctcgcggaacctgggtagaatgggagaaggacaaatgttcggactgaatgaagcgcagtacaacgctgtgaagcgcatagcaaagcagatggccgcagaaacaaaagacgccatcaagaaggacaagaagacctacgatcaggtcgccgcgaagatgatcgataaacattgggcgcaaatcaacacgctggttactcgcggccagtttatctggatagctggctacctggaaggccgattcggtcgcagggatggcgagtatgaataaaaaacaggcaaacgaatcagcgacctattgacgtcctcgcgctgaccgggtaacttgaaccacgtagacacaagaggcggtaaacatccgcaagtctggccccgctttggggcatttacaaaaggggttgtgatgcagtacaagatcatgctcacagcaagaaaaatgggcggcttttgcaagtcctgcattcaagagtttagcatgacgattgaggcgaacgacaccgccgacgcggtggagaaagcaaaaaagcaatccggcgttaatctggatacgcataaaatcaacataaactacataagggaagtcaatcaatgttaactctgattattgcactgttaatgctgttcataggctatcatgttggcgcggctcatcttgtcgagcgcctttctaagcgggtacatgaaggcacgtttgctgccatgatgtacaataagaaaactgcacgttgggaaaaaattggcgatccggatggtatcgcaaagcgcataacgttttcgccgcttccgtatgttgactgcgagcctttcgtgaaactacagaagacgcttaatcggcgaaacaaactgatatgatacaacgacccgcttcggcgggtttttttatgcctgcaatctggtatactcgcaactcaacaaagaaggagggctaaaaatgtctgaagaacgtagaaagcgcgtaacgaaatcgcactttgagggaaacttcaaagcgctatatgaaaaggaatttggcgtcgtgctggggcgcacggcagaaatgacgccagaacaattttttgatatcgcaaagcgttacttccagtgggccgaagagaacgcaatcaaggcggcggaaacggcaacattccagggcgacgttaacgagtggggagtgaacaagcctcgcattttcacgatcacagggttaagcctgttttgcggcgtgaaccagtcaacgcttgggcgctatcgccacgacccgaactatgcgccagttatggagtttatcgactccgtaatctatgagcaaaaattccagcttgctgccgtcggcatgattaacgcttctttcgtcggtaaagagatggggatcgataagccgccagtgctgaacatcgacgctatcgccggggataagaacgagatcaccgaagagaaattagagaaagccgtgaccaatattcttgataagctgtaagggtaggctatgaacgaaatgatcatttgggaagacctgtcgccagccgataagctggcaattaaggcactgagtacgcgaaacttttcgctattcctgaaaatctggttccagatcattcagggcgaaaagctaatgtggaactggcatcactcctacttttgccacacggttgatgaaattatcgccgggaagcgcaagagcacgatcgttaacgttgcgccaggctccacaaagacggaggtgttttcaatccacctcgcgccgtatgcgtatctcaagtgccggaaggttcgaaaccttcagatctcgcagggtgacgccctgtcaaaaggcaactcggatcgcgtgattaagatcttctcatcaagcgagtggcaggagctatggccatcaaagttcgggcgcaagcagatcgatgaatttcaggtcatggacgataacgaccgcgtaaggcttgaaatggtctcccgttcgtccggcggccaaatcgtcggtaagcgtggcgggtacatgacgccgggattcagcggccttatcgcgctggatgatatcgacaaacccgatgacatgttctcgaaggtgaagcgtgagaaaaaccacgtactactgaaaaacaccattcgatcccgtcgagcgaagaagaagaagggcgacgaaacgccaatcctttccgtgcagcagcgattgcacgcgcaggatgccacctggttcatgatgagcggagggatggccatcgacttcgatcgcattgttattccggcgatggttacgcgggaatatggcgaatcgcttcctgactggttgcgtcctgagttcgaacgcgacgtgctttccggcccgtcggtggttattgacggcgtagaatactggtcattttgggaggacaacgaatcgatcgagaaccttgttgccttgcgcgaggccgatctttatacgttcctttcgcagtatcagcaggagccaatcgccctgggtggcaacgtgttcaagtcggagtggtggcgctattacggcgattccgacaaggcgcacgagccacgcccggacaagttcgaatatacgttcatcacggcggacaccgcgcagaaggtcaaggagctaaacgactactctgtaatgtgctattggggcaagtatcgggatcgcgtctacttcattgacggaattcgcggcaagtgggaagcgccagatctccgcgttcaggccgaagcattcatcaagcagtgctggcgtcggaacaaggagtgtgggaaccttcgccggatctacatcgaagacaaggcgagcggtacaggtctaatccaggatttaacaaaggcggtaaacggcatgggcgagatcgtcccggtgcagcgcgataaagataaggtcactcgcgctatggatgcacaaccaatcatcaagggggggcgtgtcgtgctgccggacaatcacccattcgttgcagagcttgaggcggagatgagcgcgtttacatatgacgattctcatccacacgatgatatttgcgacaacgtgtttgacgccgcaaacctggaaatgaacctgagcgacgatccggtagagcgaatgaaacgccttgcgggattgaaaaagctgggtcgctaatacataatgtgggcctgacggcccacacttaaacaaggttgaaatatgaataacattaagatggacgactataatcaaatctttaatggtggcgctggttatgcgtcaaccctcgcgtctatcgcggcaagatttggaacaatgtcgcaggttgaagagttctatcatgaaaacggcatggcgaagaaaatcgttgacgtgatcccggaagagatggtggctcccggcttccagctaaacggcatttcagataacaccaagtttcaatcagaatgggacgggttaaatctggagccgcaaatcaccgatgccctttgctgggcgcggctgtatggtggctcctacgtcctggcgatggttaacgatggtcgcgcattgacttcagcagcgaagcggggtaagccgctcgaatcgatcgttgtttacgaccacgattccgtttccgtcgcagaggaggaaaccagcccgcgaagcccacgattcggaaagcctaaaatgtacgaggtgaagccgctaaacggcgggcaaccgttcaaggtgcactatacccgtatgcactacatcgacggcgagcgagtaaccaacaaggtgcgcaagctaaataatggcgctggcggttcggtgctgaacaagtcaatcattgaagctattcttgactacgactattcggaatatctggcaacgcagctactgaagcgcaagcagcagggcgtttggaaggcgaaaggcctggcgctaatctgcgacgacaaagaaggcgagtacgccgcccgtttgcgcatggcgcaggttgacgctaattcaggcgtcggcaacacgatcggcattgatgctgacgacgaagaatacaccgtgattaactctgatatttcaggcatcccggaattcttgtccgctaaaatggatcggattgtcgccctgtcaggcattcacgagatcgtgctaaaaaacaaaaacactggtggcgtaagcgcaagccagaacacggcgctacagacgttctacaaactggttgaccgcaagcgcaatgacgattacaagccgctgttagaattcctgttacagttcatcgtaacggaggaggaatacagcgtcgagttcgaaccgttgtcgctgcctaccgatgcggagaaagcggatatcttccagaagaacgccaacgcggctcgcggcctcgttaccgaccaggttattgacgccaacgaagcgcgtgatactctgtcggcgttaattcctgaactgaagctaaaaggcaacgctccgaagcagaaaaaacttccggatcgcgccgctggttcaggcagcacgcaaagcgcagagatcttaaacaacacggaggcggatgatgaaagttaacggcagaatcccaaactggcgttatcctgaagcaagcgagcgggatttatcccgctccatgcaggacgcggtgacagaactcgtggtagaaatgcgggatcgcttagaccgcctgaaatttgacgccacggcggaggagatcagccaggcagaagacgatatcagcgaatcggccatcgtgttcttttccgccgtaattgcggcgctttcctccattgggttgactatctatagattcaattctaaacagtggcttgcaattgcgattgcggctggcgggcggaacaacgaatcagttatgcgccttaaagaattcggcgctggcgggtatgaagactggtatcaagattcgttgaggaagtgggaagataccgccgaagcgtcgatcaggaagttagcaagcgatatcgttgctgactggacgacgaaagttagaaccgccaacaacattggcaagtctcgccagcagatcgatgaaatcatcgaagggcgctacgcgatttatggtagctggtcgcgcaaccgggcaagcggaatcatcggaacttttaacagtatgttgatgatgcagcgcctaaaagatgctaaagtgtcgcattacttttggttcggcatgatggatgaccgcgagcgcgaaagccatatcaagctagaaggtaagcgacgccctgttaatggtgatggcattttccccggcgaggagtacggttgccgttgctgggcggttccgtcatttgataatgaggatgattgatggttaactttaatgattactttaatcacgtaggaaaggatctgatatggaagcgagcaacatcaaaccgagtaaaagttggtgatgttgccgggtggaaagatgagcatgggtatgtatacattagattcatgggcaaactgcgacaagctcaccggatcatttgggaaatgcaccacggcacaatacccgaaggaatggaaatcgatcatattaaccatgtaacggacgataacaggatcgagaatttaaggcttgtaaccagaaaggaaaactgtaaaaacgtatcaatgagcgtaacaaacaagagtggagttgtcggcgtgagttggtgcaagagaacaggtaaatggtttgcatccataagggttgataaaaaagagcgattcttaggtagatacgaagacaaaaacgaagccatttcagcaagagaggcggcagaggtaaaatacaatttccataaaaatcacggagataaaaaatgaaaagagttcaaaggttcgacacggtaaagatgaaggcccgatttgatgagaatggctttctggttgacactccgattgtggcgcgtatcggtgcgcaaacgtaccagacgccaaccgggccgcgagtcgagttccgcccgcgttctgaggtgtttgatgctgaatcgctggcttcataccagggaaagccgatcactttgggtcacaagatggttaacgcgcagaatgcgaaaggcctggttgttggctcgtgttccggcgctggcaaagaagaagggatcggggttctcgttccggtaatgatttacgacggcgaggcaatcgagcaagcgaagaagcgcgttgccgctgaattgtcggttggttacacttcggcagatatcgatcgtaagggttggggaaacaacgccactggcgaatatcacttcgatgatgaactaccggaaaacttcgaagagatgaaaaatgattccgtctctgattgggttcgctttgatgcggtgcaaacgaagattcgcgtgaatcacgtcgcgcttgttttccgtgggcgagcagggattgcgaaattaaatcttgatagcgaacaagaattcccctatgatgacgactcaaaccacaaaggagctaaaacaatgatcattaaaattgacggcgtagatgttgaagtggccgataacgtaggcgcttacattgccaaactagacgcgcaagttgcatcggcaaccagtcaggtaacgagcatcaccgcagagcgcgacgcacttcaaaccaaagttgatggcattgaagatgaagttgccgcccgcgttgctaaaatcaaagccgacgaagacgcaaaacagaaagttatcgcagttgtttctgccgctggcgtcaagtgtgacggcctggatgttaaggcaatgaaagttgcttacatcaaagaggtagacggtcgtgatctgtctgacaaagaagattcgtacatcgacgcttcttttgactttatcgccaactctgataagatggctggcaatcgctccaaagtcttcggcaaaaaagaagatggcgagcaaaaagacaaaggcggcttaccgaaacttgacggcaccgaaatcatcgatccgcaggcaaaattccgccgctaataatttgcggccttcgggccgctaccagaccaaataaacaggagattcaaaatggcacagattccagcttcttattcccgcaagcgtgatattgctgtagcggggcagatcgctgatacgtcactttacaatatcgacggaacttgtgttgctgaaggcgatatcaaagctggcgtactggtggcttccactggcgcagtttccaatggccacaaggtagttaaaccagcaaccgcagcgagcgacgtcattgtaggcatctcgcagttctcgcaagcctactcgcctgaaggcaagtatgacgatgagagcgcagttaacgttatgactcatggccgcatttgggcgatcgctgacgcaactgttactgaagaagattgcgcgttcggttctttcgtcacctttaccgcaaacggcacagtagcgaagggtgatgccggggttatcaaaactggctacaaacacactggcgaatacaccaaaaacgcagatggcactgttctggtgaaagtgcaggtgctttagggcgctgtagctccagcggctacaactggcgacgctggcgtataaaataaggggcttcggccccatttttgcaccagaaaaaaacctttgacggcttaacgattcgtgatattcttcatctcgttaagctaaatacacaaacaggagttttcagatgactatgaaattagatgcattcgaacagagtgccattaaggtcgcaatgcagggcatgggcattgatgccgcaaaactggatgcttacggtatctggactgttaagcagatgactcaattactgaatcgccagtatgagcaggcatacccgcagaccagcgcacttgagcttttcccggtaactaccgagatctcgccgaccgcccgccgctttgagtggctcgaattcgatggcgtaacttctgcgaaaattatcgccgattacaccgacgacctgccgaccgttgaagcgatggcgaaagagaagtcagggaaagttttccgcctgggtaacgcgtggtttatttccatcgacgaaattaaaactggcgcggcgctgggttccagcctgagcgatcgcaaggcaactctggcccgcgaaggtcatgagacgctcgttaatgatctggtgttcaaaggatccgctcctcacggcatcgttagcgttttcgaccatccgaacattaaccgcatgaccgccagcgcggcttggggcgatgacgcagcagcggctgaaaaggcattcgaagatctggaagacctgctaaacatgatcgaagaaactacgctgggccgccatcacgcgaccaacatcgtgattcctccgtctaagcgtcgtcttctgacgaaaaagatgcctgacactagcggcgactcttatctgacctggttcaccaagaaccacccgaacatcaccattacggcgatggcggagctggaagatattgacggcgcaggcaccaaaggcgtgctggcatacgaaaaagacccaatgaacatgagcatcgagatccctgagcggttcaacatgctgccgatgcagccgaaagacctgcatttcaaagttccgtgcacctccaaatgcactggtctcatcgtgtaccgcccgctgactattgcgattctcaccgggatttaatcaaaagcgccttcgggcgcttttttattgcattgcattctgcaatgtgctttaatttgaaacctaaagtaaaccaatggagcattaacaatggccagtaaaaaagaaaccgtagaaaccgtagaaaccgtcgaaaccgtagaaaccaccagtgccgaacaggcgtcgcaggttgttcaactacaaaacgttggtgcatgtgcaattcgctataaaggcaaaaattacgtctatgagcaggtttttgaagtgccggaaaacgaaatcgaccgattccgccacgaaatcttcaaaggccgggtcgaattctacgacaatccgaaacgcacgcgcgaatacatcgcagcggtgaaggcgaaagcgaaagagatcgtgcagcctaaaagcgcggaataacaaaaactaacaaagggcgcttcggcgtcctttttcatatcaggagagcgaccatgaattacacaattcaagatgtgatcgataaaatgcgcagccttgcacctccgcttaaagaagttccagatgaactgctgtctgcgtgggttgtgcttgccgaagagttcgtttgcaaatccaggttcggggattccatcgttacggcgatcgcattgatgaccatgcacctaatgtttttggatggagcgatgaagcaggaaggcgaaagcctggaatcttacacgcagcgagtggcatcgttcaccctgaccggggagttttcccaaaccttcgatcgcgtatcggcgtcaagcgacaacgaaatgctttctacgccgtggggcaaaatgtactggcgtatgctcaaaatgcgaggcggtggcttcggcctccttaccgccgggaacgtgcgccgctgcggaattggtaggtgatcgctatgaactacaaacaaatccaggcacgcgcaagcgcgggcattaagtttttcagtgacgctgacggcgtattcaacaagtacacgaaaggcgctggcggcggaatcgatccggaaaccggggaagatatcattcctggcgaggtggtaacgacaatcaagggcgcgatcagggatgtaaattaccgtgacattaacggcgaaaccatcctcgctggcgataagcgcgggtttttcactcatgatgtgccaatcatggagggtgacgaaatcgaagtagacggcgagcgctaccgcgtggttaatgcccgtccggtaaaaccaacgggaaccgttgttgcttaccgtccagttttgcgcagggtggcgacttatggctaattacacgatccgggagttcacaggggcaattgatgcatggtgtaaggccgctggtgatgcgctggaggacgttgtaaggtttacgtgtgaagatattcaccgcgacctcgtaatgcgttctccggtggatacagggcgcttccgtggtaactggcaaatcacctttaaccgcgccccgctttacgcgattaacgcatatgaccaaactggcgaaaagacaatccagaacggcaaagccaacattgcactatacgcaaaaggggctgggatcacttcgatctggttcagtaacatgctaatctatgcgaacgcgctggaatacggccattcaaagcaggctcccaatggtgttatgggagttgttgcgatccggttgggcgtttatgttactgaggcaatcaagcgagcgagggcgaaaaatgcattatgagatggcgttaaaatgcaaggcggcagtggctaaatttgccgccgagaacgggttaatggtcgcaggagataacgttgactttaagccaccaaaacacggtgaaacttatctcaagttctcctacgtagaagcggattccagatctgtcagcctttccagaacttgccgcgtttatctggctatggtgcagattgacgttgttttcaaacccgggatcggaaccgacgccgcgcggctaatcgcgcaaaacgttgcaaaatccttccccgaaggcaaggttgttgattctgaaagtaagttatatgtgagcgagtgggcggaagtgtaccgcgttcagaaacacgaaacaggctggctcctacccgttcgcttcacagtaagatgcgaaagcgcggaggagagcggttatccatcaacatgactggtcttagaggtgcttataatttcttgccagcctgtaaatatataggcataatggcgttgttaaactttcatcaaaacaggagtattcaacatgcatttaccaaacggtgcaaaggtcttctttgagaaggctcgcggtgcggccattccgtttaccgcaatgaccaacgacgcgaaaaacccaaaaatcacagtggcggacggcaagctgaaggtgaaagatattgtgatcttcaccgattgcacctggggcgacttcgttaacaaggtggctcgcgtaaaagcagtgacagcaggtgtggcaacgctggaagagttcgatacctccgacactaacaagtatccgggcggcgcggccactggtaacgtgagcgtgatcactgattgggtcgaattgccttgcattcaggatttaggcaaagacggcaacgaacagcagttctataactatcagtgccttggcgatgagcgcgagcaatcagaacctacttacaagtcggcggtgacgcttaactacacgtttgcgcacgattacagtaacgcgatctaccctgtgttgcgttcagccgacgccagcaagcaggcgagagcgatgtacatgtatatcccgcgagcttccgaggttcgttactggtctggaattgcatctttcgatgacattccttccacggctgttaacgagatggaaacggtaacgcttaacattgcgcttaaaggtgctcacgtcttccttccggttgtcgtgtaattaaatggcggggcttgtgcctcgcctttttttgtgcataatagcgaataacacaaaccaatcaggagttaacaaaatggctaaattcaaaattcaaattggcggcaacctcccttctttcaaactgcccgtaaccttcacttgcccggatggcaaagaagcgaccatcaccatgaccgtaaaacatcgctccaccgatgagatgaaagacttttatgagagcgaagataaagcgccaaagggtaacgccgagtttatccgctttatggccgaaggctgggatcttgatgatgagttcaacgacgaaaacatttcctggctttgcgctcacttcccggcgttcgtcatggcactgccacaaacttacatggccgcgcttgcgggccaccgtgcaaaagtttaaggcgggctgtttatctcacgcttcagcctgagctaaccgatcgccagcttgccgagtacgggttaaggcgatcggattatgaggcagatcttgaaacgatctactttgatgaacagaccgcccaaagctggcagctattccaggccatgcaaacgcagtggcgcattgggatgaacggcccaacggggcttgactataatacattgcctatgttcttcgaattgtataaaatcgacaatcgagaagcggcattacttgacttgcaaatccttgagggtgaatatctgaaggagatttacaagaaatcaaaataagcgcctacgggcgcttttttcatatgggggctaaacatggctgataaagtagctgggttgacgtttggcgttgacgtttcgcaggttgataaagcggtacgatcactagcagaactgaaaaaccaaagccagcaaacaggcgctggcctacagtcacttgcggacgctgaaaggcgggccacggcgcagaccgaggaaatgaaccgcgcgttgcagcgccagaagcaagagactgacaaatcaaaaaccagctttagcaggatcgcaagcgccatcgatccaacgatcgcaaaaatggccaacttgcgcaaagcgacggaagaacttgataaagcgtgggcgctgggtcttgttccggacaaggaatttttccgccttggcgctatcatcgagtctaccaccaaccaactccggcggcagcaggcggcgctaaccgaagaaggtcgcgcagcaatcgcagaggcggaggcaaagcagaaggcggcaaacgccgggcgtgattttgtcgccagtctgaaacagcaggctgactccatcgggaaaacacgcgccgaactgctggaaatgaaggcggcgcaattgggtgtatctgcggaagcggccccgttcattaatgccctgaagcagcaagagcaggcgttaaagaaacagcagaatgcgatgggcctggctggcatttctgccgggcaatataaaatggccatgcgccagttaccgatgcagatcacggatattgtaacttcccttgcgtcaggtatgccaatctggctggttgcggtgcagcagggcgggcaaatcaaggacagcttcggcggcttgagcaatacgtttaaggtattgttgagctacattaacccgctaacggttggtgctgcgtcgttgggtatcgccctggcggcaatcgctaaagctggttatgactcctggaaagcgcaacgagaactggcgaatgcgctggtgctgactggtggctatgctgcgaccaccaccgggcagatcacagccttaaccgaagagattaacaaaaactcatcggctacgattggcagcattcaggaaatcgcaacatcgctcgccagttctggtaagtacacaatcaaccagattaagcagatcacgaagactacggcggaatggtcggcgcagacgggtgagagcgagaagacgatcacagggtattttgattcgatcgcaaaagaccctgttaaggggcttgccgatctcaatgagcagtttaatttcctgaaagagggccagctaacctacatcgaatctttgcgtaaaaccaaaggcgagacggcagcagcagaggcggctacaaaactgtttgctgatactatggataagcgccttaaagatatcgcggacagcgcaacgccactcgaaacgatgtggacggatatcaaaaaatgggccgctgactcatggaaatgggtaggcgatcacacggtaggggcgctaaaccttatcgttgatacggtttccgcgatcattaacacgatcaggaagctgattgccgacggcgacgccatgatcgcgcagttcatcgttgacgctggccggaagctgcaaaaaattccaggaatgggcgactttggcaatgaatttctggcgcagcaggagcagctaatcaaggactcgaaagcgaaatccgacacgcttgcaaaaaccattgcggaacagcaggcaaggatcgcaaaaggcgaaatgggttacattgatgccgcgaaggataaaaccctttccggtgggtacagcagcaaaacgaaggatcgcgtaaatcaggaagaaaaagatatcctgaaaaaccgcaacgccaggaagcagcaggtagacgcgggcgttaaaattgatgagcagtatcaggctgaactgctatcgctacaggcgcagctaaaggttttgcagcagcacaaagggcttgacgacaagatcagccagcagcgcaaagactacttcgagacggttgctaaattccaggttttggaagaggcaagccagaagcgaaaactgacccaaagcgaacagcagatgctggcgaacaaaaagaatatcctgtacatggcggaacaaaaggccattgtgggagatcagattgttcagcagcagcgactgaacgccttgcttgacaagtctaccaagtatcaaaaccagatggcggagaagaccaaggcgctacaggataccgccggaatgggtagcaaggagcaggagagataccgggccaatgcgcagatggcggctgactggaaaaacaacggcggatctttaagtgaccctggatttaaagcgatgcaggccgcaagcgataaattctacgcacagcaagatgcgcaaatgatgaactggaaggccgggtttactaacgcgtgggctgacattggcgaagaagttaatgacgtatacaccaatatcggggatatcactaaaaacgcatttaacggcatggcgagcgtgctgactgattttgtcatgactggtaaggccagctttagcgacttcgcaaagagcgtgatcactgacattaccaacatgcttatcaagatggcgctgtttaactcgctttctgccgcgtttggtggtggtggaacgttcagcttcgccagcatgttcagcaaaggcttttctggcggcggttacactggcgacggcgggaagtatgagccaaaaggcgttgttcacggcggggaattcgtattcaccaaagaggcgacgcaaaggttaggcccggaaaacctgtaccgactaatgcgcggctatgcaagtggcggcctggttggtggtaacgcaagttccggatctggaatcaccaacggcggcaacgtcgcggcgtcggcggctatggtgtttaccattggtgatattaacatcacgatgggttccggtcaggatagcaaggggctagagcagggcgtaaggcagatcgtgaacgatatgttcaccgaggctttgagccaaaacgggcgcattgcgaagttcgtcaatgagaaaacgaggaggtagtagtggattcctttaaatggtgtacacaaatccaaggaggggcggcgaaagtcgccgtatccaataacgttcgggcgatcagcttcggaaatggctacatccaaactgcgtcgagcggcattaacacaaagcgccggactgttccgatcgtttatggcggttcggattgggaagcggtttataacttctgtcaggatcacgtaacaaagccttttgtgtggaaggcaccggatggaagaatgggcgtgttcgtcgtaactgccgactccgttaaccttgcgccgcagggtggcggggtgtttgaggtaacggctgaattcgccgaacgcttcacttcagccggataatcaaaaagcgccctttacgggtgcttttttttggcctatgatctggagtcaattagaggagggcttacgatgacagccaatgtttcaaaagattttgcgaactgcctacaaaaacttttccccggcgagatcctaacgctgatcgatatcgacgccacaaagttcggcgggcaggtctaccgattccataacgagaacgtcgcctatacaaccgaggagcttttggccgcggttaacggcgggacgcttcagccaaagatgatcacgtttcgcggcgagcagtacggcccgcgaccgttcggcctgggcgggatcgcaatgtcgagcgatggcacagtggaaaagccaacgctgacggttagcaatattgatgcgcaagcgagtgctcttattcgagcctataacggccttatgcaagccaaagttacggtatgggttttggtcaaggaattgctacaaaacgacggcagcgttaaagagggcgattttaggcgatttatttactacatcgagcgcccaaaacaggtcgacccgcaaaaggcaacgttcgaattaacatccgtgtttgatatggatggattaatgatcccggcccgtctgacgcaaaccgtttgctattgggcgcagcgtgggtggtacaagtctggcaaaggctgcgactacaacgggcagaacggatacttcgacaagttgggaaacagggttgaagacccgtcgcaagatgtttgtggcggcttggtttcttcttgcaggcttcgttttggcaatgaaccgttgagttttggcggttgtgcgacagcaacattgaaaagtggaaggtaatatgttaactccgaaaatcaaaatgcagatcatgcagcacgcgaaagaagtttacccgcatgagtgcgcaggtctggtgacgcaaaaatcacgagtgcaaaaatatcaccgactcgacaacgtttcgccagatcctgagaaagaatcaatgcctgatgaaacgcagtatgcgctggcatcaatggagggcgagccgatcgccttcgttcactcccacactggcgatggggcaaccacaattccgagcgccactgatttatgcttttgcgatgagtctggcttgtcgtgggttatcgtctccatcccggaaggtgatatgcgaatcattgagccgaaacgccgacctctgattggtcgcccctgggctttgggcgcttacgattgctatggcctaatcatggattttcacaagcgccacggcgtcacactaaaagatcggcgattgccgttcgaatggtggaagccggaatacaaagagaatctttaccaggattactggcaagaggacggattcattgaaaacactggcgagcctgaagttggcgatatgatcatcttccagattcaggcggaaaagtggaatcacgctggtatttacgttggaaacaataacatccttcatcacgcgtttggcaagctgtctcgcagggatatctattctggatggtacgagcagcacaaggttttaatttgcaggcacaaggagcttaaacatggcatcacatacaaagacgattaaactatccggttccctggggcgtcggttcggtgtcttccacaaacttgcggttgattcagtcgctgaatgcatccgggcgctgtcttaccaggttgaggggtttaagcctttcatgcagagcaaggttggtttaaatatgcgcttcggcgttgtcgccgacggaaaaccaatcagcgcgaacgaccttgcgacttttgccgtggcgagggagatcagaatcattccgatcccaaaagccagaaagaacggcgggttgttgcaggtcgttatcggagcggcgattatggttgcggccttctttactggcggcggctcgctggcggctatgggcgctttttcatcggctgcattcatggctggcggctcaatggttttgggtggcgtaatgcagatgatcgcaccgcagatgggcggcaatatgcgggcgagcgaatcgcctgagaataagccatcgtatgcgttcggcgggccgattaacaccacggcggcaggttatccaatccagttgccatacggttacagattggctggcggcgcattgttcggttctggatcttacgcagaagacaacaactaattaagccattcgctttttagcctgggggcgtagcctccgggctttttgtcgtgtacaattgcgagactattaacaggaggctaaacgatgactaatatcaaggcccgtaagggaggctcaagcaagccgcgtaccccggtagaaatgccagataacctgatctcaaaagacaagatcaagttattgctggctgtttctgatggcgaggtcgttaacgacttcagtttgaagcagttgcatttcggcggcgtcccggttcaaaacgaagatggaagttacaactatgaaggcgtgattgctgagtttcgccccggcacgcaaacacaggactacatccagggcttcagcgaatcaagtgctgagttccaggttgctcgtgaagtcactcacaacacgccttatacgcttaccgtatcgaacaaaaatctgtctgctattcgctttcgcctgttatggccgcgcgtgctgactcaaaaagataacggcgatatggtcggatcggttgttgagtacaagatcgagatggcggtagatggcgcaagttatcagacctacctaactggcaaaattgacggaaagaacacgactggcggttacgatcggagcattcgcgttaacctgccgcaaaacttcacgtcgcaggttcttatccgcgtgagccgagtaacgccggatgctgacggggtgaaggttgtcgatgccttccaggttcaatcctacgctgaggtcattgatgcaaaattccgctacccgttaacggccatgctttacgttgagttcgatagcgacctgttccagaaccagatcccaaccatctcactcaaaaagaaatggaaaattattcaggttccgagtaattacgatccgattaatcgcacatactccgggacgtgggacggtgtttttaagtgggcgtggagcaataacccggcatgggtgctttatgacctgatcatgaatcagcgctatggtttagaccagcgtgagttaggaatcccggttgataagtggtcgctgtatgaggtggcgcaatactgtgatgaacttgttcctgataatcgcggcgggatggaaccgcgctatttgatggatgtaattgttcaatcgcaggttgaggcgttccagttggtaagggatatttgttccgcgttccgtggaatgacgttctacaacggggaaagcctttcgattatcgtcgataagccgcgcgatccggtgtacctgtttacggctgataacgtcgttgatggcgttttcgttcggacgttcccaagcgaaaagacgatgtacacgtcgtgcaacgtcatgttcgacgacgaagaaaaccagtacgaacaggatgttgaaccagtattcaaccctgacgcagccatgcggttcggccacaacccgaccagcattacagcgatcggatgtaccagaaggacagaggcgaaccgccgtggtcgctggattctgcaaacgaacctaagcgccacaaccgtttcgttttctactggcctggaaggtatgattccttcttgcggcgatgtgatttacgttgcagatccgcattggcaatcggcctttaacctggtgctatcaggccgcgttatggaagtgtctggcgtgcaggtgttccttgcctaccgctgcgacgcgaaggctggcgacactctgatcctgaatacagacgacggcaagccagtgcgccgcacaatcgccagcgtttcggcggacggtaagaccatcacgctaaatgttgggtataactttgacgttgcgcctgacagcgtattcctgatcgagagcgatcagcttgcagcggaacagtatgtagtaacccggattgaaaagggtagtgatgacgacgaatttactttcgccatcacggctacgcagtacgatccgaacaagtatgacgcgatcgataacggggtaattaccgatggccgaccaacttcggttgtcgaccctgattcaatgggcgcaccgaaagacttaacgattagctctttctcccgcattgttcaggggatgagcgtcgagacgatggttatcggatggtctgccgtgcagtatgcaaaactgtacgaggtgcaatggcgcaaggacggtggtaactggaacaacgttccgcgcactgcgacaacgcaggttgatatcgaaggcatctatgctggcgagtatcaggcccgcgtgaggtgcattagcggtgggaatgtagcgtctccgtggtctgaattggcaaccgccacactgaccgggaaagtcggagcgccaaaaggcccgattaacctgtttgcgtcggacaatgagatcttcggcattcgagttaagtgggctatgccggaaggagcggaagacacggcatacattgagctttaccagtcgcaaagcggaaccgatcaggacgcaagcctgcttactctgattccttacccggcggctgaatactggcactcaattttgcccgctggctacgtgaacttctacaaagccagaagcgtagaccggatcggcaatgtttcagaatggactgattacgctcgcggcatgtcgtcgactgacgttaacatcatcacagatgcgatcctggatgaaatcctggatagcgacgcgatgaaggaactacaggaaaacgcacaggatagcgcggcaaaactcaatgactacgcgaacagcatcattcaaaatgcgctggcgaatgatgcggacgttaggaaaatgacgaaggagaacggtaagcgtaaggcagagatcgcgcataccacggtgctgattgccaacgaatcagaagcgagggcggctgaaattacgcaacttaaagcgcagattgatgaagatatcacgtcgcagattacgatccttaacgaagccctggcgacggaaagcgagacgagagcaacgcagattggtcagttgcaggcagattttgcggctgatattgacggcgtaaaaacaacaatgaacgctggttttacgcaggttaatcaggctattgcaaatgaaagtgacgcgcgtgcaagttccgaggcggcactagatgccaaaatcgggcagaactccgcagcgctaaaccagaaactcgactcgtgggcgaacgttaatggcgtcggttccatgtacacgatgaagttgggcttgaggtacaacggtcaggagtatagctccgggatggccctacagcttacctcaagtggtggaagcgttgtttcgcaggtgctgttcattgctgatagatttgctatcatccgtaatgcggcgtctggcgcgtacacgctaccgtttgttgtgcagaatgaccaagtgttcatgaataacgcgcttattcaggacggttcgattaccaacgcgaagatcggtaacgtcattcagtccaacaactttcaggagaatgttgcaggatggaggcttgataaaaacggcgtatttgtcaactatggctcaacttctggcgaaggttccatcaagcaaacgaaccagaacatcactgttcgagatggtagcgggcgcgttcgttgccagttgggtaggatcactggatcatggtaaaattaatgccgggagaaatcccggcttaaccaaaggaggcagacaatggcttatggttttcaatcatgggatgcgaacgggaaccccaacaactatgggatcgtccctgtttcagttgctggatatattgcattagcgcaaggccagaaaagcggaacgtggtattacaacgtcccgcctgggttgaggcttggtttcttttgggtcgcaaatcaagaccagtacggcacatcgaagaggcgaattaccgttagtggtaatcagatcgttgtttcagatgcgccagatgatgcgctggaatcaggcgtctacccggcgacgcaaggttttattgtcgttcaaattatgagttgatgattatggcagattacggaattttacttaccaatgatagcggcaatgtttgggtttcgcctcaaagcatcccactggcactactatcaaagcagagcatcactcttaggggtggtactaactccgatgaagtaagatcggtaacttacgacacgaatcacccatgcgttccgttcgtggtctttcatggatcttcgccacaaggtgcattcacaaaaatcaagtacagcggaaacacttgcagcgttgttttttcttttggtaagcaaaacgtatatgcggaggtttattttttctccgtgttcccacagccaaatcctggttatgggcttgcaatttgggatgaaaacggcacgctgattttgaccaatgaaaccagaacactttcagacgtacagacctacggcactggttttaatctaaacgtcactaacggcgggaagtgggcggttagtcctgttcagttaggcgcgatcgttggtgttgttcgcgatccctacccaagaccatttcagggcgactattgcgcagcggcattctttaacggctcaagcacgcaacttaccgcatatctaacgcaggcaccaggaggagccgccagcgatctaacctacgtcaatatgaaaaacacctgcatcgctattgattgcgcaagatacgactaaaagaaaggggccatacggcccctttttctaccccttgagatttttgatctcctcttttaattcatcaacttgagcagacagagctttgattgcgcaaattgcatccatcaaaagagcattattgtcaagcacaagtttcttattttcaactacgttaccctcatcatcctgataggatgcgctgctttctttaacgtagcacgaatcgatatctcgcacctgctgtgcaataactcccctacgctcgcgtttcttaacatcatccttataggtgaacttgaccagattcattgctttgatgttttcgagtgactgcaaaccatcataagcaacaacattgtctttgtagttaatgtcagatagaccagcaaaaacaacgttgccataagcagtgcttgcaatattaccatctgatttaaactgccaatactgcgtattaccgccagttccccatttgctgacctcaataacggcacgatgttcataacccctatgttcctcaagccacatagcgcaacgcgcaccgttaccattaatgttgaaccgtgagataaatgatggagatttaaggatatcaccattattcccatttggatcgctagttggccacgctacaaaagcatcattaacggtactcctcacagtcccatatgacacaacacttccgcgaagatcggcagccccgccaactcgcaacgtgctcgacattgtaacagcgccgcgaagatcggcagccccgtcagcacgcaacgtgcttgacattgtaacagcattgctaaagtttgcattcaacccggtaacagcaaagttcgatgcatcaaaaacaacctgcttcgcgctgttcatatctccattagggcggaagtacattccttgaccattttcagggattgagtacacgatcgcattgctgttatttgccctaatagtgcaaccgttcagggtcagcgtggcgtttcctccaggaacgctaattgcctgcggctggctgaacgtgttagctacgttggtgcgcgggatcgtattatcattagccatcaaatagtcagacggtgaattatatacaattccagaaggctccgtgtcaatccaggtataaccagtgcgatcaatgattggccccgtaatcgaccctttgttagcctgtacgtttacatgattcaaccacagttcaggaacccatccgccgggagcatgaatataaacatcaaacgaggagtctgtgtttttcaccaccccaagattaatgcgtctggtgtcgtttggtctggcagcaatcagggtgcgctgagtaaaccaagtgtcaatattattactggttagcgtatcgggaagaccgcggccagaaatcgaaaagatatcaaccgggagatttgcagtgccataaccagtacctccgccaatgatgaactgagcaaatgcgtagccatcaccagcgttcttgacgttggcgatcttcatccacttctccccagcgaaagtgccagtaattttatccggcacctggacgccagccacaaggtcgacaacctgatcacgaagattttgcgtctgccccttcgcagtttgcgcgtcgttcttcgccgagttggccgcagtttctgacgcttttgcattggtctccgaggttttggctgcggtttctgatgcctttgcattggtctccgagtttttggccgcagtttctgacgctttggcgttggtctctgaggtcttcgctgcggtttctgatgcctttgcgttagtctccgacgtcttcgcagcattcttggatgcagcagcattggtctctgaagtctttgcagcggtttctgatgcctttgcattggtctccgaggttttggccttattctccgaagatttagcgttcgtctctgaggtcttcgctgcggtttctgacgctttggcgttggtctctgaagtttttgcagcgctttcagacgcagccgcagccgtagcgcttgcgcccgcagcttcggaatctgccctcacctgatcggcaagactttgcagagcttcgaaatcgaagttcttaaagaagtcgacagcatccgcaatttgagtttcctgtgactggtagtagcgcagagtttccgcaacatcttgcgccagtccgtcaacggtcagcgagtcacttaacaggatcgcgtaatcgctagacgctacgacagcgccttttgtggtgatggctttaatttcagtatcgctaaccaccttgtttacgacggccatttgaattggtgacgacaaaaacataatcgtcgcaccagggcgaatcagcgaaagcgatgattgccattttgtgccagtcccggtaacggttccgtctgcggccatagccgctttgccttctctgtatagtgccatgtttttaagcctcattggttgattgagtaacgcagataatagcatcaatgaaccgataaaaaaaggagcctttcggctcctttagttgtcaaattagaacgggatatcatcatcgaaatccatccccgcattcccgccgctgttttgcggcttaggcgcttgttgcggcttgggttgttgaggctggccccacccggattgctgattgccgccgccgctttgcgaaggatcgcgctggctgaattcgagttgcggcataatcatttcgttgtggctgtaaattgtgccgttgtgctcgcggttaacgatctgaagcgtccggcaggttacgctgatcaccttatccatttgcagcgcttcgtcgtaccacttaatcatgttttcttttgcaaagaaaactgcgcggtagttcgtgtaaattgtttcgtcctcgccatcacgattgcggatcttcatccgctccgacaggtctacggcgtacattttccacggcccgttattgttgctgccctctttgacataaggcgcttttcggattacccctgttacaacatgcattgtcattcctatggggcggcttcccgcccgttaaattagttgaaagatgaaatatcttgcgcttctggttcaggttttgattctaccttttccggctcgcgcttcgcaacctcttgcggtttaccggggttaaatccgtttgccggggtgactttcagttctgcctggcgtttggtgatatcgtcttccgtcattttccactccgccggggttaacgtttgtttcgccagcttatagatctcacgaagcgattcgagatcttcgcacgcgtcaatgcgttttttgaagtctttcggtgtcattttcgtaatttctgcatcatcatccgcctgcttgatacctagcgctgcggccagcgcataacggcgggcgtaagatgttgttgagccgtatgcttgttcgacggttttactgatcggcatattgtactgaaacgccatgaactcgccgctttcatgcaaaaacatagtttcgaggtgcatcaccttttcggtgctcgtatccatcatggattgaatgaccataattttgttcttctccagcgccggggaaatagcgtcgaggatatccccaagattcgcataggtgttcccaagatggttgttcttaccgcttttctttgcggccacgaagccagattttgccttgattaatgcggctgcgatggtggtaaatttttcagatgtacgcatgataaagtttccttttcctaattggtaatgcgcactatatcacaagtgcgcaccagtgtttagctatttgtgccgtatacgtccgggaacatgtatttcacaaactgaggagtcggcaaaacaacttccgccgcgtttgactcatatgatggccatgaatcgtgcttcacgcattcagcatactgatgaatcacgctttgatactgtttgcgaccgatctcgatctgctggctggtcagggtgaacgccagcggagcaaacggtgattttttctcctgcgttagcagtctgacaactaccgggcgtttttcgttgtaagtcttcacgaacagatcgcgctgcaatgccatcttgagatagtagcccaagttgaaggcgagtcgcccgaaatcgtcaggcttggaagattgcgtggttttgtagtcggtaatcaccacgacctcgaaaacctcatccgggttgaacccccactccttgatgagttcgggatcggaaacaacgtcaacatgatcgagtcgaaccttaaccttgacgccgaagatctcaccgaagattgacaattcacgctgtgctgtaggcgattcgatacatgcggcgtgtcgcgggttagccagcatcacgctgcgcatttgaacaacggcatcgaaatcaacatccttaaccagcttgcgcccggagtttatcgcggcgctttcgtcgcacagttcaatagcccaccaaacatttacgtcaatcccggcgcgatatgccatttccagaagttccgggtaatccttgttggacgtcccaatcaggccacacgctttcagcttcgcagacagtgccgacttcgacgtaatcagatctttaacctcgcccggagaagtcgcccgcaggtactcgccattaaactttgccgtctcaagcatacaggtatgcgaacaggttccgaacgccagcgcggctgcttcctcacgcactttgaatttccagtgcgccggggatgttgcgtaaatctcgccgaggcttgagccgctaacgtattccgcgcaccaggagttaggatcgtggtaatcatcgttggataattccgcgttggtgtatgccttaaaaattgcttcagccattggtatcactccatttgtggtttcgttgcgttaagtatacgcatgacgattccaggcgcaagtcaaaaagtgctatccgcagttggttaaaaaacgagcgaaatttacgtaagatttagtaagatgcatcttacgtgatttttcctatatatttcatttagttaatgcaaatcggtaagatggtaatatccctataggtaaatatccatgaaaaatatggcgcgaaatccagcgaaaaaagacacgcaccccggagaaatcttaccaagattgatagatacagatagagtaataataataatattgttatttatcatatacttactatctatatattgcggttaattggttaaattttgcgcgaaatttacgtaagattcatcttactaaatcttacctaaagtggttcgaccagctgcaagccactgaatttcaggcataaaaaaaggtaagactgatttgctcaatcttacctaaattctggtcaacatttaatcatagaagcgacgatgccctgtacaacttgcgttcaaatccgagcttaaagttgtcaccgttcggaacgataactttaagatcccgatcgtcagcagccgccagcatatcccgatctccacgacggcaaactacccgcatttctcgcttaccttctccgccattgcctttatacctgtacgccacgatctcgacgtttgaaggtatgatgcaggcccaaacgtcgcacttgaacgaactggcaatattaaagtgcatcgcctcaatccaggatcgagcaaggtaaatcggcccgttaccgtcgtcgctctgattggtcactatcaccgatccgaatgtcagatcgccagccaacatcttctcccgaccctcctcatcaatgaacagcatgttgcaatactcatcatccggcccatcctcatgcactagttgcattggtagcgcgtgaattagctcctgtctgcagttctcgtgagtttttacgccaaccagatatgatttgatatgctcattttcaatgccctcatagagcgttacaggcgtgctatcgacggcctccgttctgtttaaaactgccatcactctttcatgatctgccatctttccgtagtcatacccgttatcacgagctacctgcttgtttctcttgactacgtattcttgcggaacctttccgagatagcgcccaagaatgttgatgcactcgctatacggctggccgcttaacttcattaaccagccgatccccttatcggcaccgcaaccgccacagtatgcgccgccatcacctcgcgtttccagcttgtcagtccagcggaatcggtctttgccgccgcagttcgggcagtcctggtgcttgccgttgaagtatcgagagtggatgccgcaaatgttctgcaacgcctcgcgccacatgccagccatgtacggcaaaacctctttttcatcgtaaaaatccacgtcgtaacccccaaataaaaaacgcctacacgagaatgataacccggcaggcgtttagtgtttagtcaaattgtgctatcggactacgcggagcatttcgcggcggtcgcatcggcgcgtcactggcttgccgttgctgtcaaatcttaaatcaggtcggcagaatgaggcgcgaaaacctttgcaattgttccgtcggtagctcttatgtactagataagcgccatcggctgagatcataccgcgcttacgccactgctgaacaacctggatactaactcccaactcttttgccgttccagcgataccaccgaaggcatcaataaccagctccatccgcgcagtcaacccagctcgaacctcatccttcagcacgtagtaaccagtcggtcgcttgcgtttcttcttatctttcccgcgcgacgttccgttgttgccgttcaaggttcgcttatcaaccattgccatttgctccataattcaaccctcatagcattttttgttaaacctgataaaatgttccatgtattatacacgcaactatgcgaatgacaaattaggattgacaatggcaagcacagaagaagacgtagcatattttaagcgactatttcgttatgaaggcggaacactgattcgcaaagttacaaccagtagtcgtgcattcgctggagactccgtagggtgcgagaacaacgttgggtatttacaggtaagcgtaaaaagcaaacccctatacgttcaccgaatcatttgggaaatgcataatgggcctatcccagaaggaatggagatagatcacatcaaccaggtcagaacagataacagaatcgaaaacctgcgactggtaagccaccaagtaaaccttaaaaaccaatcgatgaacagtggcaatactagcgggcacgctggcgtaagctggtttaagcgaggcggtaagtggagggcaacaataaaggttggcggaaggcaaatacacattggttacttcgcgtcgtttgagtcggcagttgccgcacgaaaagcagcagaaaaacaatatggttttcatgataaccacggagcagagaaaaagaaatgagcttatcgattgagcaacaaatagatctatacgcagacaaaatcccggcaatccaaaagagatttaccgttggaaatatcgttccgtatccatatcaggctgtggcttatattgagacagccaaaagaatagcaaactacaccgcaccgttttacattaaggcttcggtttccgccgggaaaaccatcatgatcgccatgctcgcagcgcagtgcaaggcaatgaacttacccatgatggttcttgctcgccaggccgagatcgtgaagcaggattccgaggagatcagtaacctcgacgttccaaactccgtttattgtgccgggttaggcacgaaggcggcatacttcccgatcgtcgtcggatctgaagggacggtggttaatggcctgtttaaaatgctgggcgactacgtgccttcagttctggctattgacgaatgccaccaggttgactggcaagatctggcggaagcgatcgccaacaatgaatcgttcgagtacatgagccgaccgaaggataagccgtatcgcgtgaacggggaactggtcgatgccgaccacccatacgacgaaaaattcgacgacgtagaattcggcggcggtcgcacgcagtacactatcgtcatttgtgagttaatgcggaggtgccttgagaagacagggcgagaacttcgcatcgttggctatactggttcggagtttcgcggcgtcattccgattttacaggaagacaagagccagcctggtttttggcgcgagcagatcaccgacattaacacaaactatcttgtcgagttcggatcggtggttccgacaatttttggtgatactgaatccgaagggttagggtatgacctatcagaattccacggttccagtcaggacggtacgcaggattttagcgcggaagaattgcgcaagatggaaaagaaaatccatgaatccggcgaaatgacgaagctgattatgcaaaaggtcgtggagcgtgcgaaaacccgaaacggagttctgataacttgcgctggacagcggcattgcaaggaggcggcgagctatctaccgccggacgcaacatacgcgatcatcaccgaaaagacgaactcaaagaaacgcggcgaaattttggataaggcgaatcgcggtgagatcaaatacatcttccaggtgatggccctaaccactggcgttaacgttccattttgggatttttctgtgatattgcgcaagatcgggtcgcttacgttgcttattcagcttttggggcgcggaatgcgacttctgaaggactggcaaaaacagccgccttactcgtgggtgaaagaagatcaccttgtctgggattttgccggaacaatggatgacctgggccagttgtatttcgatccgatcttggagcaggcgcaataccaaagacgcaagagcagcaagaacggcccgaaaatttgcccggtatgcaagggggaaaatagcgagtacgcccgcagatgcattcacaaagacagtaacggcaatcggtgcgaatacttctggatctcgcagaggtgcgaagaccagaaagacccgcgaacagggaagattaaaatcaaggggtgttacgctgaaaatgatattgttgcccgccaatgcagatgctgcggcgttcagcttaaagaccccaatgacaatctcaccgggaagcactatacgcagaatgactggtatgatgttgtctggttcgatatcggcttgactcgcaatcagtccgggatcatcttcaattacgtgttactgaaccatgacggcgagcgattcaccgcaagggaaaagttcttcccggaatcagagaatcagatttgcggcaagctgtggcggcaaaaggcagtcttccagcacgttagcgacgcggtaatgcgtggcaagttgggcggaatgaaaaacgcccgcaagatcctggagtatgcggaatacttccgcgcgccgaagcgcgtaacgcatcgcatcaacggcaagaaggaggacattatttcccgcaaagactttggaggcgaggagtgattacagacaaaggggattacctcgaatattacggcgggcctgtaaaggcttgcccacttgaaaaaatcgaccagatgaacagcgtttcgtggctgcgttacgaataccccgattatctgttctggcatacggttaacgagggtagcaagcacaaggcgagcgccgttgcagatcatcaaatgggattgcttaaaggcgtaagcgatatccttgtgctgattgggctgggcggaaaatacccgttcgccgccattgagctaaagcgccagggtaaatcccaggcatcgccagtgagcaaggagcaacgggaattcctcgccgccgtccgaagccgtggcgggttcgctgccgtggcctatggattcgagcagtttaagatcgcgtttgaagacgcaatcaaatagcactttttgttaaaactacccggcgcgagtcgggtattattctcccatcgaaacgaagaacggagtatttaaaatgaaaaagattattgctttaattgttctatctcttgttctcattggttgtagcgaaaaaccaaaaacatatatttgcggtaatgaatcgtttgaagttactagcgactatattaaggtggttcgcggtaatagcgctggcgttttaattgatggcattggtgaaaaccagtataagctggttacaccacttggaacggctttttatactgttaataaaaacaccattgatattaaagttagcgtttatcagaacactttaacttgcgaggttaagtaataatggcaaaagatatcacagacaaagacactcacgacgcgttcacgactttcgaacagcttgagcgtgaaacgttcataggcaacgcgcttgccactggcggacactatcaggccgtcaagcctgataaattctaccaggtaacgggcaaccgctacgccgggagcaagacgccggatatcgtccgcgacaagtggtcaaccgatcgcagccttattgcttacatggaggagcgttacgggccatacgacctggacgccgccgccgaagaaagcaacaccgtctgccctaagttttacgacgaaaagaccgattgcctcaagcgctggtgggggaaaaataagcacgtatggcttaatccgccttactcgttcccggatccctttgtgctgaaagccattgagcagatggagcatgacaaccagatcgatattttgcttcccggcgacaactctactgcgtggttccgcgacgcacagaaggcagcggctgagatcatttggattgtcgcagacgtcacggaggacgaagacggaacgcaactaagccgatccggtcgcctagccttcatcaacggcctaagcgggaaaccagtcgacaacaacaacaagggtagcgtgattttcatcatgcgcaaactcaagccgggcgaggagcaaaaaacgttctacgtcccggtaagcgaaatctgcccttcattaactaaaaagcgcatgcgcaaacgtgggatctgaaaaatggaacagcttgaatctttcaccgaatacctccacatcgtcgtcactctgctggacaagtacggcttcatcggtacggatgaagaaaagatggccttcgccgatagcatcgatggcacttatcaagaattcatggataacggcacgccgcttgctgactggcccgcgattcttgagcgcgaattgctggattttcgggcgcgtgaaggtgcggaatatttcgcgaaacagcactaattgttaaacaatgcccgccgcgagcgggtattattgttccatcaaccaatcaggagctaacgccatgaacaccaaaaccattgccgacaccatcaagatcgcacaagttaagccgcgcatcgtatctcgccacctgattaacctttctcgcctgtgcatggccgactacgtggcgaagcctttagagaatggccttgatggtgaaatcggtgcgatctacttccgcgccgcgcacggcatcgaagaaattcacatgtacgagcagatggcggaatgcttctgcatttacggtgacgaatgatgattgtagaatctggccgcgctgccgtatggcagcatgccaaagaggctggcattagtgacgatatcgtgatgatcgcaaagtatttcgatatcaaggatatctccattgtgttcaatgggaaatttacctatcttcatgagcgaccactgaagcgaacgcgtatagcggttgcgacgcgggcagaggccgacgcgctgaagatgttcattcacgaatctaagcagaccaaaaaatattacaagtagcgggagtgttgagaatgcgatatattgcgatcctgattacggcggtggttctcactatcgcaatcttcaactacgcaattcaattgggataaattatgcaacctaaaatcacagacgaagaatttttagccgcccgcgaggagggcaagacctaccgcgagatcgccgaagagttcggcatgaacgttcgcagtgttgagcgtcgcggcgttcgacttgcccgccaggggcatttgcacggtaacaatcacgtagcgaagcacatcccggacgggttcggggtcaaaggcacatcgaccatgattcgcgcgaacggtgatgaagttgtgcgctgggtcaagtcagaagtagaccgcgaccgcatgatcgctttgatggaggcggcgcaagcatcattctgcgaagacctacctcgcgctgaaccgcagcctaaggatgaatctaagttttttattgaggatcagctcgccctgtatccgatcttcgatttgcacatcggcgcgatggcccacaagcacgaatgcggcgagaactacgacaccagcacggcggaaagggttcttaaccgcttctttgactactccgtttcggttgccccgcagtcgaaaaagtcggtcttgctggtcggcggtgacttccttcacagtgacggcctggacgcagtaaccccggcaagtggtcacgttctcgatcaggatagccgttacgcgaaacttgtttatgtggctattcgctccttgcgccgagctgtgtcgctactgctgagtaatcacgaagaagtagaggtgcaggtaatcgaggggaaccacgatcaggctggcatgatctggttgcgtgcagcgctcgcagcgttctatgaaaatgagccgcgcgtattcgttgacgtcagccctgcaattatgcatcgtaccgtgtggggcaaaaccatgctgggctacacgcatggccacacgatgaagaagcctgaaacgcgccttgctgcgatggctaccgacttccgcaaggagttcggccagtgcgactacatttacacgcattccggccactggcatcaccagactgtaacggaacactcgttaggtattgacgaggtgcatggccagttaggggccaaagacgcttacgccgctcgcggtggttggcgctcctatcgccaggcggcggttattctgtacagcaaagaatatggcgaagtaggccgctttatctaccgcccgaacatgtaaccacaacggccccgcgaggggccaacaaggaaaaccgatgaatagaaatatctgcattttcgatctcgatggcacgttgtccaatggcaaccaccgcttgcacctgctgccgaaaaaggatctccaccttacagaaagttggagtgaatttaatggtgcatcaattggcgacagcccaatccaaagcacaattgatgtagcgaatgcgcttcatcgctccgggatgattgtcgttatcctgaccgggcgatccgatgaggtgaagaccgaaacaatgatttggcttgaccgttacggggtgaaatatgacaggctcatcatgcgtcgcgccagcgacaaccgtaaagacacggtaatcaaggaggaggagttacgcaaaatcggaattgatcgcattgttgcggcatgggatgattcacccaatgttattgcgcacttgcgcggcctgggtattacgacttaccaggtctgcgactacggagacaatcttcaagatcatttaaaatcgcacggagtagacaaatgaaaaatgtaattattctcaacggagcacccggaatcggaaaagataccatcgcggaaattatctcgcggaagtgggaatacaagaaccttagcttcaaacagcctatgtttgccatcgcgcgtgctgtgcttggatctactgattttgcacgctttaccgccagataccacgaccgcaagcacaaagaagtgaaatgcgattttttgggcgaccgttctccgcgtgaattcatgattcacattagcgaaaacttcgtcaagccgaccctgggcaaaaatcagttcggcaagttgctttgcgattcagcgctaacttcgccgtttaactgcatcgtcagcgacggcggttttgatgaggaggtcgagcacgtcgcagcgcatgaggcgcttaacgtatttgtcgtccgccttcatcgtgacggcatgacctttgagggtgatagccgcaaacacattcgacgacccgatctgatttgtgacacgtatcacgaacttgattttgatatgaccactggcgagcctgaagacgacgcgcaaaaaatccttgatatggtttcagatgttgcattaaaattataaagttaatgcctttattatcaccaccttaacgattgggaaccttgacgggttcccttttttttgttcttaattttgccaaatgaatatatcatcaccttaccatttaactaacagaggttgcatatcatgcgggaattcatcaacgcggcaaccaatagcagcggcggtgttgcccttgcgggatctgcatccgggcaattaatcattgctgccattggtttatttttcatgatcttatttggctcaatcggcacgtggctgaagtggaaagactcaaaagccatccgggaggcgattgattctggcgacattaaagaggcattgaggatcaggagcaaataaaatgggaatgaaaacgcggcttactttcgcggcggcggtggcgatcgcggtcgcgttcctccccgaagtggaggacactaaatacacggtttatacggatatcgctggcgtaccaactgtatgcgaaggaatcacaggcccggacgttatcaaggggaaaacctatacccggtcagagtgcgacgcgcttttaaccaagcatatccaggtagcaaagcgaaccgttgacagcaaaatcaaagtagatgttcctgacaccttcagggcgtcgatgtacagcttcacgttcaacgctggcggcggcgcatattctggcagcaccatgctgaaattaacgaaccagggccgattgcgcgaggcgtgcgagcagctatatcgctggacgtactaccgcaacccgaaaacgggtaagatggagaagtcaaaaggcttgcataatcgccgggttcaggaatatcaactatgcattaaggatctaaaatgattaaggtaattggtgtggctcttacggttgttcttctgtctggttgcgcttccagtgtcccgatcctttccgatctggtgggcagcaagccggatatgacggcgcaagtaggcgcggagaacgttaaacaggcggttggcgtgacgaacaaaacggacacgtcaagcaagcaggagactacgttcaaagagtcggcggtaggaaaggttgacacgtcgaacaaaaaatccgtaacgacctccagcattcacgccaaccagatcacggcggacaagatcgagatccgaaacgatgaaagcggaagcctgactccgtggctgattggtggtgttggggttgtaatgctggcgataggtgcgttcggtctttggcgggaacgaaaaaacaaaggggcgtaatgcccctttttctatatgtaccgcttgacgtgcaatagcgctactccgtcttcatcgttaagaccatgttcaaccgtgttggttgcagccattccttgatagagcaagatgagcgcggcacgcaagtaattttctggtgtgatctgtttcacacaaacaagcctgtgaacttccgttatcagatcttccacctggtttcccgaaaagctgttcatcactgagttggtcaaggtgcatcatctcccatatgtatcggttatccatcccttcgaacgaccggaaatcaaaacctatttccctgttatccggccccgtacaccacacagagccgttttttccgtcaaggtatccattcgtatagcttcgcgctaaaaactccttagagaccattgaggcgaacatacgttgcgatacgttggcggcttttgccagtcgaggcgcttcgcggtgcgtatagacgaacttcgcaaaatcctgccgggtgaactcccggcgagattcgcagaacttgtaaatgtcaagaataaacatcaattacctcatgaacgacgggttgataaagacttcggaatccatcacgcagataaagcctaattcctccatcttcggcaataagcgttccttaatctttttgctcaccccggcctggcctttgaagatcttcaggttgcggcaggcgttataaatgccctggacggtcataacaccttttgcctgtttgcagcgactggcgataacgtcatacatcgctttaatttccgctccctcaccagcaaagccggaagagtcagccgacgacaaatacgttttgctcaattcatggaacataatgatcgcttcgtcaatggtcgccgtgtcgatcttcttcgagcgcttcccgccgggttgccagttccggatcgtgtgaatcacggacgccagacgcataacctgcttatcaaacttacccatcgcgccgcgaagcattgtatgcgaatacttgccgccgtcgcctaactccggttctaactcctggcgggccttgttcagcctacgcattgccgcgtcagtaacctgcaacttaatgttcgactcgctcataatgtcatgaatcagccggaagtaatccgccttcagtgactggtcgatcggctcataggtcgaattcccgttttcgtcgatgaacacgcgttcacccaaacgggtttgctcacgaaccaaaaggaagcgttcagataccccgatcccgcgagagccggcctgcataatggcgtcgatggtttcatcctgggcaattacgcaaatgcagcccaaagcctcgaatgacatattgttgctaacgtcggcacgagcgatcgatacgtggcctttatcccatgctttgagcaccagttcgctgttcgtcttcttaccgccatcgtttccatacgtgatccctaaaaggctgttaaccgccgtcgcctcatcggaaataacggcaaagtttccctgtcggttgttaatcttcgccagaccttccggggtggtatcagataccgggaaagttaggtcacacaatttttctaacttctcctcaagttcgtcacggtcttcaaaaagtttcaccatatcagattgcgataactccccttttagcgcctgcttgttggcggacagcttcgccatgattttcttacgctctttctttcgagactcgttaatgcgttcgacttcggcgacaataggatcgatggcaagcgagttaatggcagacttaccagcggaaggcggctgcgacgtgataacgtaaagcgttgtcggttgctcgctgccgtggtactcgacccaaaagcggcccatcatcgcggcggatacggttccgagaaagtgcatgtaagcggatgattccgggaactgaacagaacgcgctgcatttagcgccagcttgccgacaacatcataatcattggcgatcgagattgttggatacttatccgcgtttacgtcgatatctttgggctttggccagaatgaaacggagtcacgatacccgttcgcacgaatcgcaacgcgcaggggactgatcccctccctttctgcgatggcgataatatcttgcggtgatacgcggtcatttaaaaacatgcccttgctcctgattggttaatcgttcggctaatcatatgccgtattaaatccgagatccagtgataatctaaacacgcttgaaaaacgcgcttggattatcggggcgcatggccccgaacccgtcacaggtatttagcttcgaaagtcgttccgtccgatacactgaagccaacttcctcgcggtacagcgtccagcggcatccatcacgatcgaagatgtatccggcaaccgcgccgagcgcacgaccgctttctacctggtagcgcttgccgacgctgaaggattttttcatcgggttgctatggtcaaggccgacgcattttagcgttttggtttttagttcgatgaacgtcgcaatcacctggccaccagcgccagcaataaacaactcgccgctaacgcctaccgacaaaataacgcgcttcttcttcagttcgacgctgtcatataccatcattgacacattgccttcatcgtcgacgcgggcgggataaaggttattttcgtgtatattaatagcgcggcttgacgtgcatttaatcttgattgacttcgccatttattttctttctccgatctcgatgtacaggtttaccaaatccagaaagtcagccttgcttttgcaacccaacttaaagccaacgtgcgactcaattttattttgcatcgcagccagtgttgcgccgccattattcatcctgagaacttcgcggcatacttcggcgagcttttgagatatcatttcttcaccacctttatttccatgccttcgcaagcgctcttgatatcattaatcagacgattaagccttaaatcagtcattacatggtgatgacgtatatcaataattccagcaacgactaacagcatgacggcaaagataaaaccaccaggcccggacatacacaaaacagttaacatcatcaagataataaatttcatttccgttttactccgttgcgtttcgatggggtgattctacccgactttcgccgggtagttttagaaattcgtgctattctcgataattcgcctggaacacggcgcgggcaaaacctcgcggagtaatggaacgcagcattttagtcctttctgaccttccacccaaaaacttccaggcccaaaagaaattcacgccttctactccatccggcggcgtgagccgtttcggttcgacaaaaccgtttccgtgccatatgcacgttttcttcgtgtaattgtcacagtggggcattttgggatgccacacaggctcgttcggagaaacatagccaccgaagtcgcgcggatggaaataaaaatccggctttcgccatagtgacgataatttcccgaccgggttttcgaccatccaggggcaaccatacttattgcctaattgctcgaccatcttcgcatcccctgctgcggataatacgtcattatcttcccttacgtgcttgattccgctatgcgctaacagcgtgcatggcgggaaagcgaaaatgaagtcaggatctggaatgccgagaatcgatcgcttaacgtcaaaatccttgtcaatccaaatgttaacatactggatatttgggtgaaccattcgaatgctatattctccgtggtcgccggagtcggcgttgaaacagtacaccttgcatcccttgatggcccacggcaggcccatgatgccggagccgtcgaacatgcagtaaataaccttttctttcatgctttccacgcctcaatgaacattctgttcgattccagcgtcagcgtgacgccagccagggaggactgaatgagacgaccgcccggaaccgtcccgatgatgtagcggcctttcgacttcgtgatcgtgatctgagtgaagccggaggcgcggttcatgcggagaacgacgcggccatgagcgttcaggacggcgagaatggaatcagtcttcggatggttcattgtgtagctccttcgtttgttggtatggggacagtatgccactatcccgctgtgttgttttagcaaaacgtgctattccggaacgcaggtcgcgtaatcctggctgatgtagatcgtgcgctgaacgcgaggttcgagatcaccgagttcctggatggtaacatcgttgcttcctacccggcacggaaccgatccgaaaataaactcgccagtctgcttgtcgttgatttgccatacattaccgccttcctttttgacaaccaggaaaggcgcactgtctgcactgaactcttccgggccacgaccgtagtaatgcgtgatcgcagctttggccgcagcgctgaaggcatcggtaacgtcattggtcgccttgtctcggatggccttgatacgttcttcaggcgatccgatgatgtaggaaaagctgttcgaaatggtaactgttcgcattatattttaacctcgttttggtggatgaagtcggcgacgtaatggcattcgatcgggttctcgatacccgccagcacctcgcaagacccgttattcagtagctggcaatgctggcactccgcaccgccaacactggcaatgacaatggcgatcccgttgcatgaaccgccgaacattcgatgagggaagtggtaagcatcgcaggtgcaaaccacctccccggcccgccgtttcctcatacctggcccttctcgatgcagaaaacccaatcacgagcgtcaaccgcaaagcgtgcaacgccgtcgagcaccacgaagacagtaaacccgttgacgccgcgacccttctcgatatcggtcacggtgcggaacagatcgcttgcgccatattgaattttatccccgacgactacatccgcaaatgctttcatggttaatctcctgactggtttcgatgggttaactataccaggcctcgcggcccggcgtttagcaattcgtgcttatttcactgctttcttcgctgccttgtacgcctctttgaaagccggaacatcttcgaccggaatccagaagccggagccatagccatcgtcatagcaagggcattggtcgcagtagtcgccccaggttttctcttctccgccgacagagaatccagtgggcattttgcataacgcttcctcaaccgcttcgatcttgtcggcgtcgctatccatgataacgaagttccacttgccgttatactcgctgcccaggttgattgattcgcgttgaagtttcatagctttagcccctttggctcaattcgtttcgttgaagtcatcatagcaaagccgatcggatggattttaacaaaaaatgctattcctgcgattgctgattattccaccgattcggaatagtggaatagatggtgattgcacctgattccctggtgattagttttgacgaatcatgattgcttttgattgtttcattttgtgcaacgattttgtgagtgtttcaggatttgcaacgaattgcataaatgtatgcaccatgcacgcaatttgccgatcgaagccagcaaaagcgccaggtgtttttcgccaacatttacgtcgtgtggaaatgtgggggaggaataatcttacctaaaaattgcgcaaaaagtgaccaacataagcctataatagatatataagtatatgataaataataatattattattattactctttatctatatatatgtttggtaagatttcttcggggaggttatggattcctcttgcgcaagccatagtttttagatgttccgccgcgaaaaaatgtatatagggatatata

SEQ ID NO: 234 - DNA, 49441 bp, synthetic construct
  source 1..49441: mol_type = other DNA
tgtatgcaccatgcacgcaatttgccgatcgaagccagcaaaagcgccaggtgtttttcgccaacatttacgtcgtgtggaaatgtgggggaggaataatcttacctaaaaattgcgcaaaaagtgaccaacataagcctataatagatatataagtatatgataaataataatattattattattactctttatctatatatatgtttggtaagatttcttcggggaggttatggattcctcttgcgcaagccatagtttttagatgttccgccgcgaaaaaatgtatatagggatatataggggatgacagcaaatcttaccaaacacgcttaaacccttttacggcaaggcttgcgggtggtaagatgacattcccacacaagcaaaaacgacgtaaatgttggagaaaaacacatgcaatataaaggctatgagttcgaagaagtcgacgtgtccgagtggatgcagtacgacgcagataagcaggcagcttaccatgaatggctgcaatccatcacgtttggcggctcaccaggggtagacgatcggccagttgctgaaaagtcacccgccgcattcactggtaatcgttcgtccgagatccggcgcatgttcctggatggcgggcgacgtatccagatgacggcggaggagttcgcggataagttcggcgttcatccggtcgacaaccatttccgcaggccgttgctgaaactcctggagccgggagaagtgttgcgggtgagcctgggggcggggttgatctccgtctttaccgagttcgacgcaatgactggctcaaacatggaggctgaggcatacaggcggcagggcgctatctccgagagggaaaggattaagggtttagtggccgctcttgctgtagactttgccggacatgccctggccgggatttacaaggcgaacttgttcgcggctatcgatcttggattgaccgccagcgatatcagccaggaagcggccaccacgcaatagcactttttgttaaaacccggtcagagcgatcgggtattgtctttccatcgacaacgaaccgaggaaaacgaaatggtcactcttatcacatgggaacacgaaaacagcgagccagtggtgcgcgaattcgagaccgtagcggcatgttacaacctggcggcaaatggtggcttttacaaggcgcagatcgttaacgagttcggggttgttgattatgaattttaaggcgagcgacgtaaaacctggcgtggtctacggatcgcgcctcaataaccgcctttggcggtgggacggcgaaactatgtggactaaaggcgagggcgatgttatctggcatgaatgcggctggccataccccaccatgagccgcctcgatatcgcttattatctttcggttggcgatatgcacgagatggaagatagcactttttgctaaaacactgctgtcgagatccggtattatttattcatcgacaacaaagaggagatgaaaatgagcaagaagaatccatattcaaccagcaactaccataacgaacacgtcatgcgctggcactggcagaaactcaaagaacgccaccttgcacgccatggcaaataatcacaatagcgccgcttcggtggcgctgtatcccaaccataaaaacggcttacaccaggaggattggccatgccacgattttcagcaacaacaaaacttcgcaccttcgccgggatgccgatcccatactcatcaaccaaagccgtccagggcagcgagcacggcgtatacttccactggtgcggcaagtggcgcttcaccgtcattcgcggcttttacgtgacctgcgaccacgtggatattaccgactattccggcggaaaccaggttcatgagttcaataggcacgaatagcactttttgctaaaactcgatcggggcaatgcgttattattaccccatcgaaacagaggagcaaaaaacatgattggcaaccacaacaacgaactgaacgcagcagcccaccgtcgcgccgtcgagcagaacttcaacgcgcttaaagtagcctgcgatgagatgaaagcaatgcttgaactgccgtcatgggatccccaactcgaagactattacgacggcctccgcgtcaagcgtgacgatatcatcaaccgcctgcgcctggctggaatgtttctgtaaggagaacgcaatgattcacgaaattaagtctggaaaacaagtagtggccaccatcacgcagcgccacgttgtagcatttcagtttaacatccccggcaccaacgatatgcagtctcttgacgtgccagtttgggctaacacgatcgccattgatgccgacggctcgatttgggcctacgagtcgaccgccgaggatgtttgcatcccggactactcgcgcaaagcctgggtggattgtgggccttccgaaaacaagatgcggtcagtaggggagatggatcgcttccatgattgggcagaatcgaagattgaccttcgcggcctgaaatagcacgcattgctaaacgcccggtcaagggatcgggcataatcatcacgaagtctattaacaaaccgattatgcaaggagacagaagaatgcaacaatttgaatctcgcggcaagacatacaacctgccggacactgctacccatgccgcccctggtgcgtgcggcggcctgtattttaaggatggcgatagttggtttttcatgggggatgtggttgggggtgtaccgacgaagacaggcagcttactcgtgggcttctacgatcacgacttggtggagttgaagccaaagcgcgtaccgttcgctttctggaaaaaaatcaaaggggcgatctttaaatgaatcaattcgaattcctggcgcgtgcgcaccgtgcgcttgcaatgtacgccttcagcaagaacatgaagattatcagtgttgaggttgagttcaacaatatcagcatttccggctacgttggcgactcataccacgtgacgaaattcagcttcccatcgctggcttgcctggagcgtgaggcattcggtttctgaatagcactttttgctaaatgcccggtcagcagatcgggcataatggccacacaccaaacaacggagattcaccatgattcgcactaccagaccactacccaataacctttacgccacgattggggttcgcgcggtgagacttattcacatcaacgaagttggcaacgtggctattttgtggtttaagcgccactcaagcggtgttggcctgagcattcaaagattcgggcgctttaacggcaactcccaaacccattctcattgggttgatggctcatactgctggacgcacgttaagcacgtcgagaacttcgacgccaaatcactgagcgacgacgacgcctggaagatggtaacagacctcttcggttatgatgcctgcatggaggtagttggatgatacgtttatcagacttcgatcgccactgcttaaccgggcaatttggcgaaaagccagtaatgtgcaagatctcgaaggtaaaaggcgaccccgtcgagcaggtcaatacgcttaaaggcctggcaatgcgcaaccgactttacatccatgtgcgcggcagactgttcgcacagcaggttcatttttcgcatgggacgtggttctacactggcggggacggggttggcccatcgcagaaaagggttatgctgcgcgagataatcgaacacggttacgtttggactaacgggatctactaatggaaacggtaaaagtaatttgcacgcacgctggctattcgccgctatccacctatttcacgcctggccgcgagtatgacgccatgttcggccccggccttgatgaagtgtggattttgcaggacgaccagaacaccacggaagacgaagaattttggccagcctgccgcatgccggacgaaaagatcgccatgtacgccaataggccatacgaaaacaacgttttgtttgaggtgaaagtatgaaagtaagcaaaaagaaactcgcgctgtattgggccttcttcctggctggccttgccctgcataacagcgtgggctggcagacgatcggaatgctgtgcatgattattggtgtatgccgactgtctgagattaacgggttccgccgtggatatcgggcagcattcagcggcgaaaaagaatagcactttttgttaaaactgccgtaacgtcatttgataaagtggcgttactgaagtgaaacaatccaatcaggagcaacgcaatgaacgataatttaatcgcactgctggaagaactgaattcctacggctgtgcatacatcgagctttctagcgaacacgttatcgaagtcattattgacgatgacgcagggttcaccaagttaagggtggctaccggggccgaagaggaattcgaagactgcggcatccgtgaagtaaccaaccttctcgaagttcaccaggtgaaggagatccgctaatgaaaaccgtcaaactaatggttgtcaatgcggcccgcgaacgtgaacgccaccttatcggctgcgtattcgatgccgtcgaggtaaaagactcaaaaggagactttcacgtaatacagggcggataccttaacgaatttatcgtcaatccgctggatactgacgaagatttgaccatccgtgttggtagcgagccggaaaacgcgcttttccacctgcgtaaagtatcgaaggcatcgcagcgcaagttgctggttcgcgcactgaagcgcatagcgaagcagcgcggctacaccgatgcatacatccgcaagttcggcacgttcgctggagtaggtgattgggcgcggtcatgggccgacttttatttcaacaaatccggcgaattttgttcagcgcatacggactggctgcatggcacggaacacgatccagttaacggccacgagtggtacgaattcattgaggcggaattagacgccctttgatagcacgaattgctaaaacgaacgtccggggatggtgcatactatccccacactaacgaacaaaggaaattacccatgaacaaaccaaaaatcatcctgatcccgtccgtcgattccgtggttaatacttatgctaaattcaccaaaggcaagcgctataccgcaaccgcatttaccaaatgttccggcgaaatgctgtacaaggtcagcgatgactacgggcgcgagtatcacgtaaacccaagatcttcgcactatcttggtggccatcgcttcgatattgagtacccgatcgaagattgcagtaagcgcgactcgttcacctacgatgacagccgttctatcgccattcgcgctgcaaccatcggggacgggtttattagccgggcctgcatcgttgatctgatcccgtccgataatcacgccaaagacgacgccgacacgctgttaaatgccgtcgttcgcgccggaatcggcttggagttaagtgatgcgtcgtgcgaatcattcatgcgtgaaccgttctcacgaatcgcggagcttgaaaagcaagttgcgttcctgactggtgaacttcaggccgcaaacagcaagatcgagaatgttcgcaaaatcatgcgtagcaagcctggccatgacattgaagattacgcgcgggttttgcgcatgatggccgacgcattcgccaaactttagcagtagcacgaattgctaaaacagatcaggggtaagctggtatagttaccccatcgaaacgaaacggagttacagcaatgaaaatcaaaatcaccaaaatcaacactcttaacggcgacggctcaattaccctggaagaatgcggcctcaaaatcggcgaagttcttgaggtcgacggccacttcaacgacggctcatactgtgtgatcgctccgcgcaatagcgagtttatccaggctggtgacaatatcagcgtaagcgcagacgaatgcgaggttgtggaagaatgagcaacaaatttgggtactgacttacaccattggaaccaacgaggggcgcaaatcgcgccgcctcatctgcgacaccaaagagcgggcgattaggcagcaaaccgttcttggtggcgaacttgtcgagtatctccgcaagcctgaagcgttcaaggtgaactggccggaaggcatggatatcaacggcgctttagcgagcctgcgtgaattgcagaacaacccgaagacgtggagcgactttcaatgcctgcgggcggagccggaagtgaaggccgaccagttcaccaatgttcggtcgcagcacgcggagtggtcggatcgccagttcggcgacgttgggccagtcgggccgctcaaacacctggcgaaagaggcgatcgaggccgccgaagcgccggatgacattagcgagttcgctgatatcctcatgctggtatgggacgcaacgcgccgcgccggattcagcgatgagcagttggctgaagcggtggcggaaaagctggaacggaacaagcgccgggcgtggggcgaggtcaaagatggcgagccttgccaccacgtaaaaaattaacgaaatcgaatgccgtttaaagcgcctgtaagccattctggctggcgcaaatttaaggagtacgattgtatgcctgaatactcgaaagtcgaagatatgccgattggtgcaacaattactggtatccgcatgagcgagtcggacgacgccatcaagccgctggcgttcccggttacgcaggtggagacggacagcagaaaagggttcatcttcatctacaaaaatttcaatagtccgctgcgggttgaagtattcatcgctcgcggaacctgggtagaatgggagaaggccaaatgttcggactgaatgaagcgcagtacaacgccgtaaagcgcatagcaaagcagatggccgcagaaacaaaagacgccatcaagaaggacaagaagacctacgatcaggtcgccgcgaagatgatcgataaacattgggcgcaaatcaacacgctggttactcgcggccagtttatatggatagctggctacctggaaggccgattcggtcgaagggatggcgagtatgaataaaaaacagccaaacgattcagtgacctattgacgcaatcgcgctgatcgggtaacgtgaaccatgtagacacaagaggcggtaaacatccgcaagcctggccccggttaggggcgtttacataggagttatgatgcaatataaaatcatgctcacagcaagaaaaatgggtggcttttgcaaatcctgcattcaagagttcagcatgactattgaggcgaacgacaccgccgacgcggtagagaaagcaaaaaagcaatccggcgtaaatctggatacgcataaaatcaacatcaactacataagggaaatcagatgatgctaactgtgattattgctcttttaatgctttttataggttatcacgtcggagcggctcaccttgtagagcgactttcaaagcgggtacatgaaggcacctttgctgccatgatgtacaataagaaaacggcacgttgggaaaaaattggcgatccggatggtatcgcaaaacgaattgctttttcgccgcttccgtatgttgactgtgagctatttgtgaaactacagaagacgctgaatcggcgaaacaaactgatatgacaaaagaacccgcttcggcgggtttttttatgcccgcgatctgatatactcgcaaatcaacacagaaggaggattacaaatgtctgaagaacgtagaaaacgcgtaacgaaatcgcactttgcaggcaactttaaagcgctatatgaaaaggagttcggcgtggtgctagggcgcacggcagagatgacgccggaacaattttttgatatcgcaaagcgttacttccagtgggccgaagataacgcaatcaaggctgcggagacggcaacgtttcagggcgacgttaacgagtggggagtgaacaagcctcgaatttttacgctaacagggttaagcctgttttgcggcgtgaaccagtcaacgcttacacgctatcgccacgatcctaactatgctcccgtcatggagttcatcgactccgtgatctatgagcagaaatttcagcttgctgccgtcggcatgattaacgcttctttcgtcggaaaagagatggggatcgataagccaccagtgctgaacatcgacgctatcgccggggataagaacgagatcaccgaagagaggttagagaaggcagtgaccaatattcttgataagctgtaagggtcagatatgaacgaaatgatcatttgggaagacctgtcgccagccgataagctggcaattaaggcgcttagtacgcgcaacttttcgctattcatgaagatctggtttcagatcatccagggagaaaagctgatgtggaactggcatcactcctacttttgccacacggttgatgaaattatcgccgggaagcgcaagagcacgatcgttaacgttgcgccaggctccacaaagacggaggcgttctcaatccacctcgcgccgtatgcgtatcttaaatgccggaaggttcgaaaccttcagatctcgcagggtgacgcgctgtcaaaaggcaactccgatcgcgtgattaagatcttctcatctaacgagtggcaggagctatggccatcaaagttcgggcgcaagcagatcgatgaatttcaggtcatggacgataacgaccgcgtaaggctggaaatggtctcccgttcgtccggcggtcagatcgtcggtaagcgtggcgggtacatgacgccaggtttcagcggccttatcgcgctggatgatatcgacaaaccggatgatatgttctcgaaggtgaagcgtgagaaaaaccacgtactcctgaagaacaccattcgatcccgtcgagcgaagaagaagaaaggagacgaaacgccgatcctttccgtgcagcagcgattgcacgcgcaggattccacctggttcatgatgagcggcggcatggccatcgacttcgatcggattgttatcccggcgatggtaacgcgggaatatggcgaatcactccctgactggttgcgacctgagttcgagcgcgacgtgctttccggcccgtcggtggtaattgacggcgtggaatactggtcattttgggaggaaaacgaatcgatcgagaacctggttgcgctacgcgaagccgatctttatacgttcctttcgcagtatcagcaggaaccgatcgccctgggtggcaacgtgttcaagtcggagtggtggcgctattacggcgattccgacaaggcgcacgagccgcgcccggacaagttcgaatatacgttcatcacggcggacaccgcgcagaaggtcaaggagctaaacgactactctgtaatgtgctattggggcaagtatcgggatcgcgtctacttcattgacggaattcgcggaaaatgggaagcgccagatctccgcgttcaggccgaagcattcatcaagcagtgctggcgtcggaacaaggagtgcggaaaccttcgccggatctacatcgaagacaaggcgagcggtacaggtctaatccaggatttaacgaaggcggtaaacggcatgggcgagatcgtcccggtgcagcgcgataaagataaggtcactcgcgctatggatgcacaaccaatcatcaagggtgggcgtgtcgtgctgccggacaatcacccattcgttgcagagcttgaggcggagatgagcgcgtttacatatgacgattctcatccacacgatgatatttgcgacaacgtgtttgacgccgcaaacctggaaatgaacctgagcgacgatccggtagagcgaatgaaacgccttgcgggattgaaaaagctgggtcgctaatacataatgtgggcctgacggcccacacttaaacaaggttgaaatatgaataacattaagatggacgactataatcaaatctttaatggtggcgctggttatgcgtcaaccctcgcgtctatcgcggcaagatttggaacaatgtcgcaggttgaagagttctatcatgaaaacggcatggcgaagaaaatcgttgacgtgatcccggaagagatggtcgctcccggcttccagctaaacggcatttcagataacaccaagtttcaatctgaatgggacgggttaaatctggagccgcaaatcaccgatgctctttgctgggctaggctgtatggtggctcctacgtcctggcgatggttaacgatggtcgcgcattgacttcggcagcgaagcggggtaagccactcgaatctatcgttgtttacgaccatgattccgtttccgtcgcagaggaggaaaccagtccgcgaagcccacgattcggaaagcctaaaatgtacgaggtgaagccgctaaacggcgggcaaccgttcaaggtgcattatacccgtatgcactacatcgacggcgagcgcgtaaccaacaaggtgcgcaagctaaataatggcgctggtggctcggtgctgaacaagtcgattattgaagcgattcttgattacgactattcggaatatctggcgacgcaactactgaagcgcaagcagcagggcgtttggaaggcgaaaggcctggcgctaatctgcgacgacaaagaaggcgagtacgccgcccggttgcgcatggcgcaggttgatgctaattccggcgtcggaaacacgatcggtattgatgcggacgacgaagagtacaccgttatcaactccgatatttcaggcatcccggaattcctttccgcgaaaatggatcggattgtcgccctgtcaggcattcacgagatcgtgctaaaaaacaaaaacactggtggcgtaagtgcaagccagaacacggcgctacagacgttctacaaactggttgaccgcaagcgcaatgacgattacaagccgctgttagaattcctgttacagttcatcgtaacggaggatgaatacagcgtcgagttcgaaccgttgtcgctgcctaccgatgcggagaaagcggatatcttccagaagaacgccaacgcggctcgcagcctcgttaccgaccaggttattgacgccaacgaagcgcgtgatactctgtcggcgttgattcctgaactgaagctaaaaggcaacgctccgaagcagaaaaaacttccggatcgcgccgctggttcaggcagcacgcaaagcgcagagatcttaaacaacacggaggtggatgatgaaagttaacggcagaatcccaaactggcgttatcctgaagcaagcgagcgggagttatcccgctcaatgcaggacgcggtgacagaactcgtggtagaaatgcgggatcgcttagaccgccttaaatttgacgccacggctgaggaaatcagccaggcggaagacgatatcagcgaatctgccatcgtgttcttttccgccgtaattgcggcgctttcctccattgggttgactatctatagattcaattctaaacagtggcttgcaattgcgatcgcggctggcgggcggaacaacgaatcagttatgcgccttaaagaattcggtgctggtgggtatgaagactggtatcaggaatcgctaaataagtggcaggattacgccgaagcgtcaatcaggaagttagcaagcgatatagttgctgactggacaacgaaagttagaaccgccaacaacattggcaagtctcgcaagcagatcgatgaaatcatcgaaggtcgatacgctatctatggtagttggtcgcgcaaccgggcaagcggaatcatcggaacttttaacagtatgttgatgatgcagcgcctaaaagatgctaaagtatcgcattacttttggttcgggatgatggacgaccgcgagcgcgagagccatatcaagctagaaggtaagcgacgccccgttaatggtgacggaatcttccccggcgaagaatacggttgcaggtgctgggcggttccgtcatttgataatgaggatgattgatggttaactttaatgattactttaatcacgtaggaaaggatctgatatggaagcgagcaacatcaaaccgcgtaaaagttggtgatgttgccgggtggaaagatgagcatgggtatgtatacattagattcatgggcaaactgcgacaagctcaccggatcatttgggaaatgcaccacggcccaataccagaaggaatggaaatcgatcatattaaccatgtaacggacgataacaggatcgagaatttaaggcttgtaaccagaaaggaaaactgtaaaaacgtatcaatgagcgtaacaaataagagtggagttgtaggcgtgagttggtgcaagagaacaggtaaatggtttgcatccataagggttgataaaaaagagcgattcttaggtagatacgaagacaaaaacgaagccatttcagcaagaaaggcggcagaggcaaaatacaatttccataaaaatcacggagataaaaaatgaaaagagttcaaaggttcgacacggtaaagatgaaggccagattcgatgagaacggctttctggttgatactccgatcgtggcgcgtatcggtgcgcagacgtaccagacgccaaccgggcagcgcgtcgagttccgcccgcgttcggaggtgttcgatgctgaatcgctggcttcataccagggcaagccgatcactttgggtcacaagatggtgaacgcgcagaacgcaaaaggccttgtcgttggctcgtgctccggcgctggcaaagaagatgggattggtgttcttgttccggtgatgatttacgacggcgagtcaatcgagcaagccaaaaagcgcgtagctgctgagttatcagtgggctacacttcggtcgatatcgatcgcaaaggttggggtaataacgcaactggcgaatattatttcgatgaagaccttccggaaaacttcgaagagatgaaaaatgattccgtctctgattgggttcgctttgatgcagtgcagacgaagattcgcgtgaaccacgtagcgctcgttttccgtgggcgtgccgggattgcgaaattaaatcttgatagcgaacaagaattcccctatgatgacgactcaaaccacaaaggagctaaaacaatgatcattaaaattgacggcgtagatgttgaagtagcagataacgttggcgcttacattgcaaaactcgacgcgcaagttgcatcggcaaccagtcaggtaacgagcatcaccgcagagcgtgacgcacttcagaccaaagttgatggcattgaagatgaagtcgccgcccgcgttgctaaaatcaaagccgacgaagacgcaaagcagaaagttatcgcggttgtttctgccgctggcgtcaagtgtgacggcctggatgttaaggcaatgaaagttgcttacatcaaagaggttgacggtcgtgatctgtctgataaagaagattcgtacatcgacgcttcttttgactttatcgccaactctgataagatggctggcaatcgctccaaagtcttcggcaaaaaagaagatggcgagcaaaaagacaaaggcggcttaccgaaacttgacggcaccgaaatcatcgatccgcaggcaaaattccgccgctaataatttgcggccttcgggccgctaccagaccaaataaacaggagattcaaaatggcacagattccagcttcttattcccgcaagcgtgatattgccgtagcggggcagatcgctgatacgtcgctttataatatcgacggcacttgcgttgctgaaggcgatatcaaggctggcgtactggtggcttccactggcgtagtttccaatggccataaggtcgttaagccagcgaaagcagcgagcgacgtcattgtaggcatcgcgcagttctcgcaagcctactcgcctgaaggcaagtatgacgatgagagcgcggttaacgttatgactcatggccgcatttgggcgatcgcggacgcaactgttactgaagcagattgcgtgtttgattctttcgccacctttaccgcaaacggcaccgtagcgaagggtgatgccggggttatcaaaactggctacaaacacactggcgaatacaccaagaacgcagatggcaccgttctggtgaaagtgcaggtgcttcagggcgccgttgctccagcggctgcaactggcggcgctggcgtataaaataaggggcttcggccccatttttgcaccagaaaaaaacctttgacggcttaacgattcgtgatattcttcatctcgttaagccaaatacacaaacaggagtttttcagatgactatgaaattagatgcattcgaacagagtgcaattaaggtcgcaatgcagggcatgggcgtcgatgccgcaaaactggatgcttacggtatctggactgttaagcagatgactcaattactgaatcgccagtatgagcaggcatacccgcagaccagcgcacttgagcttttcccggtaactaccgagatctcgccgaccgcccgccgctttgagtggctcgaattcgacggcgtaacctctgcgaaaatcatcgccgattacaccgacgatctgccgaccgttgaagcgatggcaaaagagaagtcagggaaagttttccgcctgggtaacgcgtggtttatttccatcgacgaaattaaaactggtgcagcgctgggttcaagcctgagcgatcgaaaagcaaccctggcccgcgaaggtcatgagacgctcgtaaacgatctggtgttcaaaggctccactcctcacggtatcgtgagcattttcgaccagccgaacattaaccgcatgaccgccagtgctgcatggggcaatgattcagcggcggctgaaaaggcattcgaagatctggaagacctgcttaacatgatcgaagaaaccacgctgggccgccatcacgcgaccaacatcgtgattcctccgtctaagcgtcgtcttctgacgaaaaagatgccggacactagcggcgactcttatctgacttggttcaccaagaaccacccgaacatcaccattacggcgatggcggagttggaagatattgacggcgcaggcaccaaaggcgtgctggcatacgaaaaagacccaatgaacatgagcatcgagatccctgagcggttcaacatgctgccgatgcagccgaaagacctgcatttcaaagttccgtgcacctccaaatgcactggtctcatcgtgtaccgcccgctgactattgcgattctcaccgggatttaatcaaaagcgccttcgggcgcttttttattgcattgcattctgcaatgtgctttaatttgaaacctaaagtaaaccaatggagcattaacaatggccagtaaaaaagaaaccgtagaaaccgtagaaaccgcagaaatcaccagcgaagaacagacgccgcaggttgttcaactgcaaaacgttggtgcatgtgcaattcgctataaaggcacaaattacgtctatgagcaggttttcgaagtgccagaaagcgagatcgaccgattccgccacgaaatcttcaaaggccgcgtcgagttctacgacaatcctaaacgcacgcgcgaatacatcgcagcggtaaaggcgacagcgaaagagatcgtgcagcctaaaagcgcggaataacaaaaaccaacaaagggcgcttcggcgtcctttttcatatcaggagagcaaccatgaattacacaattcaagatgtgatcgataaaatgcgcagccttgcacctccgcttaaagaagttccagatgaactgctgtctgcatgggttgtgcttgccgaagaattcgtttgcaaatcccggttcggagactccatcgttacggcgatcgcgttgatgaccatgcatctaatgtttttggacggcgcaatgaagcaggaaggcgaaagcctggaatcttacacgcagcgagtggcgtcgttcaccctgaccggggagttttcccaaaccttcgatcgcgtgtcggcgtcaagtgataacgaaatgctttctacgccgtggggcaaaatgtactggcgtatgctcaagatgcgcggcggcggcttcggcctgcttaccgccgggaacgtgcgccgctgcggaatggttaggtgatcgctatgaactacaaagcaatccaggcacgcgcaagcgctggcattaaattcttcagcgacgctggcggcgtgttcaacaagtacacgaaaggcgctggcggaggaatcgatccggaaaccggggaagatatcattcctggcgaggtggtgacgacaatcaagggagcgatcagggatgttaatgaccgtgacattaacggcgaaaccatccttgctggcgataagcgcggttttttcactcatgatgtgccaatcatggaaggtgacgaaatcgaagtagacggagagcgctaccgcgtggttaatgcccgcccggtaaaaccaacgggaaccgtcgttgcctaccgtccagttttgcgcagggtggcgacttatggctaattacactatccgcgaattcacaggcgcaattgatgcgtggtgtaaggccgctggtgatgcgctggaggacgttgtaaggtttacgtgtgaagatattcaccgcgaccttgtaatgcgttctccggttgatacagggcgcttccgtggtaactggcaaatcacctttaaccgcgccccgctttacgcgattaacgcatacgaccaaactggcgaaaagacaatccagaacggcaaagccaacattgcactatacgcaaaaggggccgggatcacttcgatctggttcagtaacatgctaatctatgcgaacgcgctggaatacggccattcaaagcaggctcccaatggcgttatgggcgttgttgcgatccggttgggcgtttatgttactgaggcaatcaagcgagcgagggcgaaaaatgcattatgatatggcgttaaaatgcaaggcggcagtggctaaatttgccgccgagaacgggttgagggtcgcgggggataacgttgactttatcccaccgagaggcggggaaacctaccttaaagtctcctacgtcgaggcggattcaagatcggttgacctgtcaaggaaatgccgagtctatctggcgatggttcagattgacgttatctttaagcctggaatcggaaccgatcgagcgaggattatcgcccaacgcgttgcaaaatccttccctgaaggaaagattgttgatcgtgacggtaagttatatgtgagcgagtgggcggaggtacacggcgtgcagaagcacgaaacgggttggttcttcccggttcggttcacagtaagatgcgaccgcacggaggagagcggctatccatccaactagcggaacctcacgtcgcttataatttcttgccagcctggaaatatgtaggcataatggcggtgtaaaactttcattcaaacaggagtattcaacatgcatttaccaaacggtgctaaggtcttctttgagaaggctcgcggtgcgaagattccgtttaccgcaatgaccaacgacgcgaaaaacccaaaaatcacggtggcagatggcaagctgaaggtgaaagatattgtgatcttcaccgattgcacctgggacgacttcgttaacaaggtggctcgcgtaaaagcagtgacagcaggcgtggcaacgctggaagagttcgacacctccgacactaacaagtatcctggcggcgcggctactggtaacgtaagcgtgatcactgattgggtggaattgccttgcattcaggatttaggcaaagatggcaacgaacagcagttctataactatcagtgcttgagcgatgagcgcgaacaatccgaacctacttacaagtcggcagtgacgcttaactacacgtttgcgcacgattacagtaacgcgatctaccctgtgttgcgttcagccgacgccagcaagcaggcgagagcgatgtacatgtatatcccgcgagcttccgaggttcgttactggtctggaattgcatctttcgatgacattccttccacggctgttaacgagatggaaacggtaacgcttaacattgcgcttaaaggtgctcacgtcttccttccggttgccgtgtaattaaatggcggggcttgtgcctcgcctttttttgtgcataatagcgaataacacaaaccaatcaggagttaacaaaatggctaaattcaaaattcaaatcggcggcaatctcccttctttcaagctgcctgtaaccttcacttgccccgacggcaaagaagcaaccatcaccatgacagtaaaacatcgttcaaccgatgagatgaaagacttttatgagagcgaagataaagcgccaaagggtaacgccgagtttatccgcttcatggctgaaggttgggatctggatgacgaattcagcgatgaaaacatttcctggctttgcgctcacttcccggcgttcgtcatggcactgccacaaacttacatggccgcgctggcgggccaccgtgcaaaagtttaaggcgggctgtttatctcacgcttcagcctgagctaaccgatcgccagcttgcggagtacgggttaaggcgatcggattatgaagcagatcttgaaacgatctactttgatgaacagaccgcccaaagctggcagctattccaggccatgcaaacgcagtggcgaatcgggatgaatggcccgacggggcttgactataatacgttgcctatgctgttcgaattgtataaaatcgacaatcgagaagcggcattacttgacttgcaaatccttgagggtgaatacctgaaggagatttacaagaaatccaaataagcgcctactggcgcttttttcatatgggggcgaaacatggctgataaagtagctgggctaacgtttggcgttgacgtgtcgcaggttgataaagcggtacgatcactcgcagaactgaaaaaccaaagccagcaaacgggcgctggcctacagtcacttgctgacgctgaaaggcgggccacggcgcagaccgaggaaatgaaccgcgcattgcagcgccagaagcaagagactgacaaatcaaaaaccagctttagcaggatcgcaagcgccatcgatcccacgatcacaaaaatggccaacttgcgcaaagcgacggaagaacttgataaagcgtgggcgcttgggcttgttcctgacaaggaatttttccgcctgggagccatcattgaatccacaaccaacaatctacggcggcagcaggcggcgctaaccgaagaaggtcgcgcagcaatcgcagaggcggaggcaaagcagaaggcggcaaatgccgggcgtgattttgtcgccagcctgaaacagcaggctgactccatcggaaaaacacgcgccgaactgctggaaatgaaggcggcgcaattgggcgtatcggcagaagcggccccgttcattaacgcgctgaaacagcaagagcaggcgttaaagaaacagcaaaacgctatgggcctggctggcatttctgccgggcaatataaaatggccatgcgccagttaccgatgcagatcacggatattgtaacttcccttgcgtcaggtatgccagtctggctggttgcggtgcagcagggcgggcaaatcaaggacagcttcggaggcttgagcaatacgtttaaggtgttgttgagctacatcaacccgctaacggttggtgctgcgtcgttgggtatcgccctggcggcaatcgctaaagctggttatgactcctggagtgcgcaacgagaactggcgaatgcgctggtgctgactggtggctatgctgcgaccacaaccgggcagatcacagccttaaccgaagagattaacaaaaactcatcggccacgattggcagcattcaggaaatcgcaacatcgctcgccagttctggtaagtacaccatcaaccagattaagcagatcacgaagactacggcggaatggtcggcgcagacgggggagagcgagaagacgatcacagggtattttgatgccatcgtaaaagaccctgttaaggggcttgccgatctcaatgagcgttttaattttctgaaagagggccagctaacctacatcgaatctttgcgtaaaacaaaaggcgagacggcagcagcagatgcggcgacaaaactgtttgctgatactatggataagcgccttaaagatatcgcggacagtgcaacgccactcgaaacgatgtggatggatattaaaaaatgggcggctgactcgtggaagtgggtaggcgatcacacggtaggggcgctaaaccttatcgttgacacggtttccgcaatcatcaacacgatcagaaagctgattgccgacggcgacgccatgatcgcgcagttcatcgttgacgctggccgacagctacagaagatccccggcatgggagactttgggaatgactttctggcgcagcaggagcagttaatcaaggactcgaaagccaaatccgccgagcttgcaaaaaccattgcggaacagcaggcaaggatcgcaaaaggcgagatgggttacattgacgccgcgaaggataaaaccctttccggtgggtacagcagcaaaacgaaggatcgcgtaaatcaggaagaaaaagatatcctgaaaaaccgcaacgccaggaagcagcaggtagacgcgggcgttaaaattgatgagcagtatcaggctgaactgctatcgctacaggcgcagttaaaggttttgcagcagcacaaagggcttgatgacaagatcagccagcagcgcaaagactacttcgagacggttgctaaattccaggttttggaagaggcaagccagaagcgaaaactgacccaaagcgaacagcagatgctggcgaacaaaaagaatatcctgtacatggcggagcaaaaggccatcgtgggagatcagattgttcagcagcagagattgaacgccttgcttgacaagtcgaccaagtatcaaaaccagatggcggagaaaaccaaagcgctacaggataccgccggaatgggtagcaaggagcaggagagataccgggccaatgcgcaaatggcggctgactggaaaaacaacggcggatctttaagtgaccctggatttaaagcgatgcaggccgcaagcgataaattctacgcacagcaagatgcgcaaatgatgaactggaaggccgggttcactcatgcgtgggctgatattggcgacgaagttaatgacgtatacaccaacatcggggatatcactaaaaacacatttaacggcatggcgagcgtgctgactgattttgtaatgactggtaaagccagctttagcgactttgcaaagagcgtgatcactgacattaccaacatgcttatcaagatggcgctgtttaactcgctttctgccgcgtttggtggtggcggcacgttcagcttcgccaacatgttcagcaagggattttctggtggtggctacactggcgacggcgggaagtatgaaccaaaaggcgttgttcacggcggggaattcgtattcacgaaggaggctacgcaaaggttaggcccggaaaacctgtaccgactcatgcgcggctatgcaagtggcggcctggttggtggtaacgcaagttccggatctggaatcaccaacggcggcaacgtcgcagcgtcggcggctatggtgttcactatcggtgacattaacattacgatgggttccggtcaggatagtaaggggatggagcagggcgtaaggcagatcgtgaacgatatgttcaccgaggctttgagccaaaacgggcgcattgcgaagttcgtcaatgagaaaacgagggggtagtagtggattcctttaaatggtgtacacaaattcaaggaggggcggcaaaggtagccgtctccaacaacattcgatcgatcagtttcggaaacggctatatccaaacggcgtcgagcggcattaacaccaagcgccggacggttccgatcgtttatggcggttcagattgggaggaggtttataacttctgtcaggatcacgtaaccaagccgtttgtgtggaaggcacctgatggaagaatgggcgtattcgtcgtaactgccgactccgttaaccttgcgccgcatggtggcggcgtgtttgaggtaactgcggagttcgccgaacgcttcacttcagccggataatcaaaagcgccctttacgggtgcttttttttggcctatgatctggagtcaattagaggagggcttacgatgacagccaacatttcaaaagagtttacgaactgcttacaaaaacttttccccggcgagatcctgacgctgatcgatatcgacgccacaaagttcggcgggcaggtctaccgattccataacgagaacgtcgcctatacaaccgaggagcttttagcggcggtgaacggcgggacgcttcagccaaaaatgatcacgtttcgcggcgagcaatacggcccgcgcccgttcggcctgggcgggatcgcaatgtcgagcgatggcacagtggaaaagccaacgttgacggttagcaatattgatgcgcaggcgagtgctcttattcgcgcctacaacggcctcatgcaagccaaagttacggtatgggttttggtcaatgaattgctgcaaaacgacggcagtgttaaagagggcgattttaggcgatttgtttactacatcgagcgaccaaagcaagtagacccgcaaaaggcaacgttcgaattaacatccgtgtttgatatggacggattgatgatcccggcccgactgacgcaaaccgtttgctattgggcgcagcgcggctggtataaatccggcaagggctgcgactacaacgggcagaacggatacttcgacaagttaggaaacagggttgacgacccgtcgcgggatgtttgcggtggcctggtgtcttcttgcaggcttcgttttggcaatgaaccgttgagtttcggcggttgtgcgacagcaactttgaagagtggtagctaatatgttgactccgaaaattaaaatgcagatcatgcagcacgcgaaggaagtctacccgcacgaatgcgccgggctggtaacgcaaaaatcacgcgtgcaaaaatatcaccgactagacaatgtttctcaagatcctgagaacgaatcaatgccggacgaaacgcagtatgcgatggcgtcaatggagggggagccgatcgccttcgttcattcccatactggcgacggggcgaccacgattccgagtgccacagatttatgcttttgcgatgagtctggattgtcgtgggttatcgtctccatcccggaaggtgatatgcgaatcattgagccgaaacgccgacctctgattggtcgcccctgggctttgggcgcttacgattgctatggcctaatcatggattttcacaagcgccacggcgtcacgctaaaagatcggcgattgccgttcgaatggtggaagccggaatacaaagagaatctttaccaggattactggcaagaggacggattcattgaaaacactggcgagcctgaagttggcgatatgatcatcttccagattcaggcggaaaagtggaatcacgcgggtatttacgttggaaacaataacatccttcatcacgcgtttggcaagctgtctcgccgggatatctattctggatggtacgagcagcacaaggttttaatttgcaggcacaaggagcttaaacatggcatcacatacaaagacgattaaactttctggttcccttgggcgtaggttcggagtattccacaaacttgcggttgattcggttgctgaatgtatccgggcgctgtcttaccaggttgaggggtttaagcctttcatgcagagcaaggttggtttaaatatgcgcttcggcgttgtcgccgacggaaaaccaatcagcgcgaacgaccttgcgacttttgccgtggcgagggagattagaatcatcccgatcccaaaagccagaaagaacggcgggttgttgcaggtcgttatcggagcggcgattatggttgcggccttctttactggcggcggctcgctggcggctatgggcgctttttcgtcggcagcattcatggctggcggatcgatggttttaggtggcgtaatgcagatgatcgcaccgcagatgggcggcaacatgcgggcgagcgaatcgcctgagaataagccatcgtatgcgttcggcgggccgattaataccacggcggccgggtatccaatccagttgccatacggttacagattggctggaggcgcattgttcggttcgggatcttacgcagaagacaacaactaattaagccattcgctttttagcctgggggcgtagcctccgggctttttgtcgtgtacaattgcgatactattaacaggaggctaaacgatgactaatatcaaggcccgcaagggcggttcaagcaagccacgcactcccgtagaaatgccagataacctgatctcaaaagataagatcaagttattgcttgctgtttcggatggcgaggtggttaacgacttcagcctgaagcagttgcattttggaggcgtcccggttcagaacgaggatggaacattcaactatgagggcgtgattgcagagttccgccccggcacgcaaacgcaggactacattcagggcttcagcgaatcaagcgctgaattccaggttgctcgtgaagtcactcacaacacgccttatacgcttaccgtatcgaacaaaaatctttctgccattcgctttcgcctgttatggccgcgcgtgctgactcaaaaagataacggcgatatggtcggatcggttgttgagtacaagatcgagatggcggtagacggcgcaagttatcagacctacctaactggcaaaattgacggaaagaacacgactggcggttacgatcggagcattcgcgttaaccttccgcaaaacttcacgtcgcaggtgcttatccgtgttagccgagtaactccggacgctgacggggtgaaggttgtcgatgcgttccaggttcaatcatacgctgaggtcattgatgcaaaattccgctacccgttaacggccatgctttacgttgagttcgatagcgatctgttccagaaccagatcccaaccatctcactcaaaaagaaatggaaaattattcaggttccgagtaattacgatccgattaatcgcacatactccgggacgtgggacggtgtttttaagtgggcgtggagcaataacccggcatgggtgctttatgacctgatcatgaatcagcgctatggtttagaccagcgcgaacttggcatcccggttgacaagtggtcgctgtatgaggtggcgcaatactgtgatgaacttgttcctgataatcgcggcgggatggaaccgcgctatttgatggatgtaattgttcagtcgcaggttgaggcgttccagttggtaagggatatttgttccgcgttccgtggaatgacgttctacaacggtgaaagcctatcgattatcgtcgataagccgcgcgatccggtgtacctgtttacggctgataacgtcgttgacggcgttttcgttcggacgttcccaagcgaaaagacgatgtacacgtcgtgcaacgtcatgttcgacgacgaagaaaaccagtacgagcaggatgttgaaccagtattcaacccggacgcagccatgcggttcggacacaacccgaccagcattacagcgatcggatgcaccagaaggacggaggcgaaccgccgtgggcgttggattctgcaaacgaacctaagcgccacaaccgtttcgttttctactggtctggaaggtatgattccttcttgcggcgatgtgatttacgttgcagatccgcactggcaatctgcctttaacctggtgctttcagggcgaatcatggaagtatccggtacgcaggtatttttggcgttccgctgcgacgcgaaggctggcgacactctgatcctgaataccgacgacggcaagcctgtgcgccgcacaatcgccagcgtttcggcggacggtaagaccatcacgctaaatgttgggtataactttgacgttgcgcctgacagcgtattcctgatcgagagcgatcagcttgcagcggaacagtatgtagtaacccggattgaaaagggtagtgatgacgacgaatttactttcgccatcacggctacgcagtacgatccgaacaagtatgacgcgatcgataacggggtaattaccgatggccgaccaacttcggttgtcgaccctgattcaatgggcgcaccgaaagacttaacgattagctctttctcccgcattgttcaggggatgagcgtcgagacgatggttatcggatggtctgccgtgcagtatgcaaaactgtacgaggtgcaatggcgcaaggacggtggtaactggaacaacgttccgcgcactgcgacaacgcaggttgatatcgaaggcatctatgctggcgagtatcaggcccgcgtgaggtgcattagcggtgggaatgtagcgtctccgtggtctgaattggcaaccgccacactgaccgggaaagtcggagcgccaaaaggcccgattaacctgtttgcgtcggacaatgagatcttcggcattcgagttaagtgggctatgccggaaggagcggaagacacggcatacattgagctttaccagtcgcaaagcggaaccgatcaggacgcaagcctgcttactctgattccttacccggcggctgaatactggcactcaattttgcccgctggctacgtgaacttctacaaagccagaagcgtagaccggatcggcaatgtttcagaatggactgattacgctcgcggcatgtcgtcgactgacgttaacatcatcacagatgcgatcctggatgaaatcctggatagcgacgcgatgaaggaactacaggaaaacgcacaggatagcgcggcaaaactcaatgactacgcgaacagcatcattcaaaatgcgctggcgaatgatgcggacgttaggaaaatgacgaaggagaacggtaagcgtaaggcagagatcgcgcataccacggtgctgattgccaacgaatcagaagcgagggcggctgaaattacgcaacttaaagcgcagattgatgaagatatcacgtcgcagattacgatccttaacgaagccctggcgacggaaagcgagacgagagcaacgcagattggtcagttgcaggcagattttgcggctgatattgacggcgtaaaaacaacaatgaacgctggttttacgcaggttaatcaggctattgcaaatgaaagtgacgcgcgtgcaagttccgaggcggcactagatgccaaaatcgggcagaactccgcagcgctaaaccagaaactcgactcgtgggcgaacgttaatggcgtcggttccatgtacacgatgaagttgggcttgaggtacaacggtcaggagtatagctccgggatggccctacagcttacctcaagtggtggaagcgttgtttcgcaggtgctgttcattgctgatagatttgctatcatccgtaatgcggcgtctggcgcgtacacgctaccgtttgttgtgcagaatgaccaagtgttcatgaataacgcgcttattcaggacggttcgattaccaacgcgaagatcggtaacgtcattcagtccaacaactttcaggagaatgttgcaggatggaggcttgataaaaacggcgtatttgtcaactatggctcaacttctggcgaaggttccatcaagcaaacgaaccagaacatcactgttcgagatggtagcgggcgcgttcgttgccagttgggtaggatcactggatcatggtaaaattaatgccgggagaaatcccggcttaaccaaaggaggcagacaatggcttatggttttcaatcatgggatgcgaacgggaaccccaacaactatgggatcgtccctgtttcagttgctggatatattgcattagcgcaaggccagaaaagcggaacgtggtattacaacgtcccgcctgggttgaggcttggtttcttttgggtcgcaaatcaagaccagtacggcacatcgaagaggcgaattaccgttagtggtaatcagatcgttgtttcagatgcgccagatgatgcgctggaatcaggcgtctacccggcgacgcaaggttttattgtcgttcaaattatgagttgatgattatggcagattacggaattttacttaccaatgatagcggcaatgtttgggtttcgcctcaaagcatcccactggcactactatcaaagcagagcatcactcttaggggtggtactaactccgatgaagtaagatcggtaacttacgacacgaatcacccatgcgttccgttcgtggtctttcatggatcttcgccacaaggtgcattcacaaaaatcaagtacagcggaaacacttgcagcgttgttttttcttttggtaagcaaaacgtatatgcggaggtttattttttctccgtgttcccacagccaaatcctggttatgggcttgcaatttgggatgaaaacggcacgctgattttgaccaatgaaaccagaacactttcagacgtacagacctacggcactggttttaatctaaacgtcactaacggcgggaagtgggcggttagtcctgttcagttaggcgcgatcgttggtgttgttcgcgatccctacccaagaccatttcagggcgactattgcgcagcggcattctttaacggctcaagcacgcaacttaccgcatatctaacgcaggcaccaggaggagccgccagcgatctaacctacgtcaatatgaaaaacacctgcatcgctattgattgcgcaagatacgactaaaagaaaggggccatacggcccctttttctaccccttgagatttttgatctcctcttttaattcatcaacttgagcagacagagctttgattgcgcaaattgcatccatcaaaagagcattattgtcaagcacaagtttcttattttcaactacgttaccctcatcatcctgataggatgcgctgctttctttaacgtagcacgaatcgatatctcgcacctgctgtgcaataactcccctacgctcgcgtttcttaacatcatccttataggtgaacttgaccagattcattgctttgatgttttcgagtgactgcaaaccatcataagcaacaacattgtctttgtagttaatgtcagatagaccagcaaaaacaacgttgccataagcagtgcttgcaatattaccatctgatttaaactgccaatactgcgtattaccgccagttccccatttgctgacctcaataacggcacgatgttcataacccctatgttcctcaagccacatagcgcaacgcgcaccgttaccattaatgttgaaccgtgagataaatgatggagatttaaggatatcaccattattcccatttggatcgctagttggccacgctacaaaagcatcattaacggtactcctcacagtcccatatgacacaacacttccgcgaagatcggcagccccgccaactcgcaacgtgctcgacattgtaacagcgccgcgaagatcggcagccccgtcagcacgcaacgtgcttgacattgtaacagcattgctaaagtttgcattcaacccggtaacagcaaagttcgatgcatcaaaaacaacctgcttcgcgctgttcatatctccattagggcggaagtacattccttgaccattttcagggattgagtacacgatcgcattgctgttatttgccctaatagtgcaaccgttcagggtcagcgtggcgtttcctccaggaacgctaattgcctgcggctggctgaacgtgttagctacgttggtgcgcgggatcgtattatcattagccatcaaatagtcagacggtgaattatatacaattccagaaggctccgtgtcaatccaggtataaccagtgcgatcaatgattggccccgtaatcgaccctttgttagcctgtacgtttacatgattcaaccacagttcaggaacccatccgccgggagcatgaatataaacatcaaacgaggagtctgtgtttttcaccaccccaagattaatgcgtctggtgtcgtttggtctggcagcaatcagggtgcgctgagtaaaccaagtgtcaatattattactggttagcgtatcgggaagaccgcggccagaaatcgaaaagatatcaaccgggagatttgcagtgccataaccagtacctccgccaatgatgaactgagcaaatgcgtagccatcaccagcgttcttgacgttggcgatcttcatccacttctccccagcgaaagtgccagtaattttatccggcacctggacgccagccacaaggtcgacaacctgatcacgaagattttgcgtctgccccttcgcagtttgcgcgtcgttcttcgccgagttggccgcagtttctgacgcttttgcattggtctccgaggttttggctgcggtttctgatgcctttgcattggtctccgagtttttggccgcagtttctgacgctttggcgttggtctctgaggtcttcgctgcggtttctgatgcctttgcgttagtctccgacgtcttcgcagcattcttggatgcagcagcattggtctctgaagtctttgcagcggtttctgatgcctttgcattggtctccgaggttttggccttattctccgaagatttagcgttcgtctctgaggtcttcgctgcggtttctgacgctttggcgttggtctctgaagtttttgcagcgctttcagacgcagccgcagccgtagcgcttgcgcccgcagcttcggaatctgccctcacctgatcggcaagactttgcagagcttcgaaatcgaagttcttaaagaagtcgacagcatccgcaatttgagtttcctgtgactggtagtagcgcagagtttccgcaacatcttgcgccagtccgtcaacggtcagcgagtcacttaacaggatcgcgtaatcgctagacgctacgacagcgccttttgtggtgatggctttaatttcagtatcgctaaccaccttgtttacgacggccatttgaattggtgacgacaaaaacataatcgtcgcaccagggcgaatcagcgaaagcgatgattgccattttgtgccagtcccggtaacggttccgtctgcggccatagccgctttgccttctctgtatagtgccatgtttttaagcctcattggttgattgagtaacgcagataatagcatcaatgaaccgataaaaaaaggagcctttcggctcctttagttgtcaaattagaacgggatatcatcatcgaaatccatccccgcattcccgccgctgttttgcggcttaggcgcttgttgcggcttgggttgttgaggctggccccacccggattgctgattgccgccgccgctttgcgaaggatcgcgctggctgaattcgagttgcggcataatcatttcgttgtggctgtaaattgtgccgttgtgctcgcggttaacgatctgaagcgtccggcaggttacgctgatcaccttatccatttgcagcgcttcgtcgtaccacttaatcatgttttcttttgcaaagaaaactgcgcggtagttcgtgtaaattgtttcgtcctcgccatcacgattgcggatcttcatccgctccgacaggtctacggcgtacattttccacggcccgttattgttgctgccctctttgacataaggcgcttttcggattacccctgttacaacatgcattgtcattcctatggggcggcttcccgcccgttaaattagttgaaagatgaaatatcttgcgcttctggttcaggttttgattctaccttttccggctcgcgcttcgcaacctcttgcggtttaccggggttaaatccgtttgccggggtgactttcagttctgcctggcgtttggtgatatcgtcttccgtcattttccactccgccggggttaacgtttgtttcgccagcttatagatctcacgaagcgattcgagatcttcgcacgcgtcaatgcgttttttgaagtctttcggtgtcattttcgtaatttctgcatcatcatccgcctgcttgatacctagcgctgcggccagcgcataacggcgggcgtaagatgttgttgagccgtatgcttgttcgacggttttactgatcggcatattgtactgaaacgccatgaactcgccgctttcatgcaaaaacatagtttcgaggtgcatcaccttttcggtgctcgtatccatcatggattgaatgaccataattttgttcttctccagcgccggggaaatagcgtcgaggatatccccaagattcgcataggtgttcccaagatggttgttcttaccgcttttctttgcggccacgaagccagattttgccttgattaatgcggctgcgatggtggtaaatttttcagatgtacgcatgataaagtttccttttcctaattggtaatgcgcactatatcacaagtgcgcaccagtgtttagctatttgtgccgtatacgtccgggaacatgtatttcacaaactgaggagtcggcaaaacaacttccgccgcgtttgactcatatgatggccatgaatcgtgcttcacgcattcagcatactgatgaatcacgctttgatactgtttgcgaccgatctcgatctgctggctggtcagggtgaacgccagcggagcaaacggtgattttttctcctgcgttagcagtctgacaactaccgggcgtttttcgttgtaagtcttcacgaacagatcgcgctgcaatgccatcttgagatagtagcccaagttgaaggcgagtcgcccgaaatcgtcaggcttggaagattgcgtggttttgtagtcggtaatcaccacgacctcgaaaacctcatccgggttgaacccccactccttgatgagttcgggatcggaaacaacgtcaacatgatcgagtcgaaccttaaccttgacgccgaagatctcaccgaagattgacaattcacgctgtgctgtaggcgattcgatacatgcggcgtgtcgcgggttagccagcatcacgctgcgcatttgaacaacggcatcgaaatcaacatccttaaccagcttgcgcccggagtttatcgcggcgctttcgtcgcacagttcaatagcccaccaaacatttacgtcaatcccggcgcgatatgccatttccagaagttccgggtaatccttgttggacgtcccaatcaggccacacgctttcagcttcgcagacagtgccgacttcgacgtaatcagatctttaacctcgcccggagaagtcgcccgcaggtactcgccattaaactttgccgtctcaagcatacaggtatgcgaacaggttccgaacgccagcgcggctgcttcctcacgcactttgaatttccagtgcgccggggatgttgcgtaaatctcgccgaggcttgagccgctaacgtattccgcgcaccaggagttaggatcgtggtaatcatcgttggataattccgcgttggtgtatgccttaaaaattgcttcagccattggtatcactccatttgtggtttcgttgcgttaagtatacgcatgacgattccaggcgcaagtcaaaaagtgctatccgcagttggttaaaaaacgagcgaaatttacgtaagatttagtaagatgcatcttacgtgatttttcctatatatttcatttagttaatgcaaatcggtaagatggtaatatccctataggtaaatatccatgaaaaatatggcgcgaaatccagcgaaaaaagacacgcaccccggagaaatcttaccaagattgatagatacagatagagtaataataataatattgttatttatcatatacttactatctatatattgcggttaattggttaaattttgcgcgaaatttacgtaagattcatcttactaaatcttacctaaagtggttcgaccagctgcaagccactgaatttcaggcataaaaaaaggtaagactgatttgctcaatcttacctaaattctggtcaacatttaatcatagaagcgacgatgccctgtacaacttgcgttcaaatccgagcttaaagttgtcaccgttcggaacgataactttaagatcccgatcgtcagcagccgccagcatatcccgatctccacgacggcaaactacccgcatttctcgcttaccttctccgccattgcctttatacctgtacgccacgatctcgacgtttgaaggtatgatgcaggcccaaacgtcgcacttgaacgaactggcaatattaaagtgcatcgcctcaatccaggatcgagcaaggtaaatcggcccgttaccgtcgtcgctctgattggtcactatcaccgatccgaatgtcagatcgccagccaacatcttctcccgaccctcctcatcaatgaacagcatgttgcaatactcatcatccggcccatcctcatgcactagttgcattggtagcgcgtgaattagctcctgtctgcagttctcgtgagtttttacgccaaccagatatgatttgatatgctcattttcaatgccctcatagagcgttacaggcgtgctatcgacggcctccgttctgtttaaaactgccatcactctttcatgatctgccatctttccgtagtcatacccgttatcacgagctacctgcttgtttctcttgactacgtattcttgcggaacctttccgagatagcgcccaagaatgttgatgcactcgctatacggctggccgcttaacttcattaaccagccgatccccttatcggcaccgcaaccgccacagtatgcgccgccatcacctcgcgtttccagcttgtcagtccagcggaatcggtctttgccgccgcagttcgggcagtcctggtgcttgccgttgaagtatcgagagtggatgccgcaaatgttctgcaacgcctcgcgccacatgccagccatgtacggcaaaacctctttttcatcgtaaaaatccacgtcgtaacccccaaataaaaaacgcctacacgagaatgataacccggcaggcgtttagtgtttagtcaaattgtgctatcggactacgcggagcatttcgcggcggtcgcatcggcgcgtcactggcttgccgttgctgtcaaatcttaaatcaggtcggcagaatgaggcgcgaaaacctttgcaattgttccgtcggtagctcttatgtactagataagcgccatcggctgagatcataccgcgcttacgccactgctgaacaacctggatactaactcccaactcttttgccgttccagcgataccaccgaaggcatcaataaccagctccatccgcgcagtcaacccagctcgaacctcatccttcagcacgtagtaaccagtcggtcgcttgcgtttcttcttatctttcccgcgcgacgttccgttgttgccgttcaaggttcgcttatcaaccattgccatttgctccataattcaaccctcatagcattttttgttaaacctgataaaatgttccatgtattatacacgcaactatgcgaatgacaaattaggattgacaatggcaagcacagaagaagacgtagcatattttaagcgactatttcgttatgaaggcggaacactgattcgcaaagttacaaccagtagtcgtgcattcgctggagactccgtagggtgcgagaacaacgttgggtatttacaggtaagcgtaaaaagcaaacccctatacgttcaccgaatcatttgggaaatgcataatgggcctatcccagaaggaatggagatagatcacatcaaccaggtcagaacagataacagaatcgaaaacctgcgactggtaagccaccaagtaaaccttaaaaaccaatcgatgaacagtggcaatactagcgggcacgctggcgtaagctggtttaagcgaggcggtaagtggagggcaacaataaaggttggcggaaggcaaatacacattggttacttcgcgtcgtttgagtcggcagttgccgcacgaaaagcagcagaaaaacaatatggttttcatgataaccacggagcagagaaaaagaaatgagcttatcgattgagcaacaaatagatctatacgcagacaaaatcccggcaatccaaaagagatttaccgttggaaatatcgttccgtatccatatcaggctgtggcttatattgagacagccaaaagaatagcaaactacaccgcaccgttttacattaaggcttcggtttccgccgggaaaaccatcatgatcgccatgctcgcagcgcagtgcaaggcaatgaacttacccatgatggttcttgctcgccaggccgagatcgtgaagcaggattccgaggagatcagtaacctcgacgttccaaactccgtttattgtgccgggttaggcacgaaggcggcatacttcccgatcgtcgtcggatctgaagggacggtggttaatggcctgtttaaaatgctgggcgactacgtgccttcagttctggctattgacgaatgccaccaggttgactggcaagatctggcggaagcgatcgccaacaatgaatcgttcgagtacatgagccgaccgaaggataagccgtatcgcgtgaacggggaactggtcgatgccgaccacccatacgacgaaaaattcgacgacgtagaattcggcggcggtcgcacgcagtacactatcgtcatttgtgagttaatgcggaggtgccttgagaagacagggcgagaacttcgcatcgttggctatactggttcggagtttcgcggcgtcattccgattttacaggaagacaagagccagcctggtttttggcgcgagcagatcaccgacattaacacaaactatcttgtcgagttcggatcggtggttccgacaatttttggtgatactgaatccgaagggttagggtatgacctatcagaattccacggttccagtcaggacggtacgcaggattttagcgcggaagaattgcgcaagatggaaaagaaaatccatgaatccggcgaaatgacgaagctgattatgcaaaaggtcgtggagcgtgcgaaaacccgaaacggagttctgataacttgcgctggacagcggcattgcaaggaggcggcgagctatctaccgccggacgcaacatacgcgatcatcaccgaaaagacgaactcaaagaaacgcggcgaaattttggataaggcgaatcgcggtgagatcaaatacatcttccaggtgatggccctaaccactggcgttaacgttccattttgggatttttctgtgatattgcgcaagatcgggtcgcttacgttgcttattcagcttttggggcgcggaatgcgacttctgaaggactggcaaaaacagccgccttactcgtgggtgaaagaagatcaccttgtctgggattttgccggaacaatggatgacctgggccagttgtatttcgatccgatcttggagcaggcgcaataccaaagacgcaagagcagcaagaacggcccgaaaatttgcccggtatgcaagggggaaaatagcgagtacgcccgcagatgcattcacaaagacagtaacggcaatcggtgcgaatacttctggatctcgcagaggtgcgaagaccagaaagacccgcgaacagggaagattaaaatcaaggggtgttacgctgaaaatgatattgttgcccgccaatgcagatgctgcggcgttcagcttaaagaccccaatgacaatctcaccgggaagcactatacgcagaatgactggtatgatgttgtctggttcgatatcggcttgactcgcaatcagtccgggatcatcttcaattacgtgttactgaaccatgacggcgagcgattcaccgcaagggaaaagttcttcccggaatcagagaatcagatttgcggcaagctgtggcggcaaaaggcagtcttccagcacgttagcgacgcggtaatgcgtggcaagttgggcggaatgaaaaacgcccgcaagatcctggagtatgcggaatacttccgcgcgccgaagcgcgtaacgcatcgcatcaacggcaagaaggaggacattatttcccgcaaagactttggaggcgaggagtgattacagacaaaggggattacctcgaatattacggcgggcctgtaaaggcttgcccacttgaaaaaatcgaccagatgaacagcgtttcgtggctgcgttacgaataccccgattatctgttctggcatacggttaacgagggtagcaagcacaaggcgagcgccgttgcagatcatcaaatgggattgcttaaaggcgtaagcgatatccttgtgctgattgggctgggcggaaaatacccgttcgccgccattgagctaaagcgccagggtaaatcccaggcatcgccagtgagcaaggagcaacgggaattcctcgccgccgtccgaagccgtggcgggttcgctgccgtggcctatggattcgagcagtttaagatcgcgtttgaagacgcaatcaaatagcactttttgttaaaactacccggcgcgagtcgggtattattctcccatcgaaacgaagaacggagtatttaaaatgaaaaagattattgctttaattgttctatctcttgttctcattggttgtagcgaaaaaccaaaaacatatatttgcggtaatgaatcgtttgaagttactagcgactatattaaggtggttcgcggtaatagcgctggcgttttaattgatggcattggtgaaaaccagtataagctggttacaccacttggaacggctttttatactgttaataaaaacaccattgatattaaagttagcgtttatcagaacactttaacttgcgaggttaagtaataatggcaaaagatatcacagacaaagacactcacgacgcgttcacgactttcgaacagcttgagcgtgaaacgttcataggcaacgcgcttgccactggcggacactatcaggccgtcaagcctgataaattctaccaggtaacgggcaaccgctacgccgggagcaagacgccggatatcgtccgcgacaagtggtcaaccgatcgcagccttattgcttacatggaggagcgttacgggccatacgacctggacgccgccgccgaagaaagcaacaccgtctgccctaagttttacgacgaaaagaccgattgcctcaagcgctggtgggggaaaaataagcacgtatggcttaatccgccttactcgttcccggatccctttgtgctgaaagccattgagcagatggagcatgacaaccagatcgatattttgcttcccggcgacaactctactgcgtggttccgcgacgcacagaaggcagcggctgagatcatttggattgtcgcagacgtcacggaggacgaagacggaacgcaactaagccgatccggtcgcctagccttcatcaacggcctaagcgggaaaccagtcgacaacaacaacaagggtagcgtgattttcatcatgcgcaaactcaagccgggcgaggagcaaaaaacgttctacgtcccggtaagcgaaatctgcccttcattaactaaaaagcgcatgcgcaaacgtgggatctgaaaaatggaacagcttgaatctttcaccgaatacctccacatcgtcgtcactctgctggacaagtacggcttcatcggtacggatgaagaaaagatggccttcgccgatagcatcgatggcacttatcaagaattcatggataacggcacgccgcttgctgactggcccgcgattcttgagcgcgaattgctggattttcgggcgcgtgaaggtgcggaatatttcgcgaaacagcactaattgttaaacaatgcccgccgcgagcgggtattattgttccatcaaccaatcaggagctaacgccatgaacaccaaaaccattgccgacaccatcaagatcgcacaagttaagccgcgcatcgtatctcgccacctgattaacctttctcgcctgtgcatggccgactacgtggcgaagcctttagagaatggccttgatggtgaaatcggtgcgatctacttccgcgccgcgcacggcatcgaagaaattcacatgtacgagcagatggcggaatgcttctgcatttacggtgacgaatgatgattgtagaatctggccgcgctgccgtatggcagcatgccaaagaggctggcattagtgacgatatcgtgatgatcgcaaagtatttcgatatcaaggatatctccattgtgttcaatgggaaatttacctatcttcatgagcgaccactgaagcgaacgcgtatagcggttgcgacgcgggcagaggccgacgcgctgaagatgttcattcacgaatctaagcagaccaaaaaatattacaagtagcgggagtgttgagaatgcgatatattgcgatcctgattacggcggtggttctcactatcgcaatcttcaactacgcaattcaattgggataaattatgcaacctaaaatcacagacgaagaatttttagccgcccgcgaggagggcaagacctaccgcgagatcgccgaagagttcggcatgaacgttcgcagtgttgagcgtcgcggcgttcgacttgcccgccaggggcatttgcacggtaacaatcacgtagcgaagcacatcccggacgggttcggggtcaaaggcacatcgaccatgattcgcgcgaacggtgatgaagttgtgcgctgggtcaagtcagaagtagaccgcgaccgcatgatcgctttgatggaggcggcgcaagcatcattctgcgaagacctacctcgcgctgaaccgcagcctaaggatgaatctaagttttttattgaggatcagctcgccctgtatccgatcttcgatttgcacatcggcgcgatggcccacaagcacgaatgcggcgagaactacgacaccagcacggcggaaagggttcttaaccgcttctttgactactccgtttcggttgccccgcagtcgaaaaagtcggtcttgctggtcggcggtgacttccttcacagtgacggcctggacgcagtaaccccggcaagtggtcacgttctcgatcaggatagccgttacgcgaaacttgtttatgtggctattcgctccttgcgccgagctgtgtcgctactgctgagtaatcacgaagaagtagaggtgcaggtaatcgaggggaaccacgatcaggctggcatgatctggttgcgtgcagcgctcgcagcgttctatgaaaatgagccgcgcgtattcgttgacgtcagccctgcaattatgcatcgtaccgtgtggggcaaaactatgctgggctacactcacggccacacgatgaagaaggcagaaacgcgcctcgccgcaatggctacagacttccgcaaggaatttggtcaatgcgactacatctacacgcattcgggccattggcatcaccagaccgtaacggagcactcgttagggattgacgaagtacacggccagttaggggccaaagacgcttacgccgctcgcggtggttggcgctcctatcgccaggcggcggttattctgtacagcaaagaatatggcgaagtaggccgctttatctaccgcccgaacatgtaaccacaacggccccgcgaggggccaacaaggaaaaccgatgaatagaaatatctgcattttcgatctcgatggcacgttgtccaatggcaaccaccgcttgcacctgctgccgaaaaaggatctccaccttacagaaagttggagtgaatttaatggtgcatcaattggcgacagcccaatccaaagcacaattgatgtagcgaatgcgcttcatcgctccgggatgattgtcgttatcctgaccgggcgatccgatgaggtgaagaccgaaacaatgatttggcttgaccgttacggggtgaaatatgacaggctcatcatgcgtcgcgccagcgacaaccgtaaagacacggtaatcaaggaggaggagttacgcaaaatcggaattgatcgcattgttgcggcatgggatgattcacccaatgttattgcgcacttgcgcggcctgggtattacgacttaccaggtctgcgactacggagacaatcttcaagatcatttaaaatcgcacggagtagacaaatgaaaaatgtaattattctcaacggagcacccggaatcggaaaagataccatcgcggaaattatctcgcggaagtgggaatacaagaaccttagcttcaaacagcctatgtttgccatcgcgcgtgctgtgcttggatctactgattttgcacgctttaccgccagataccacgaccgcaagcacaaagaagtgaaatgcgattttttgggcgaccgttctccgcgtgaattcatgattcacattagcgaaaacttcgtcaagccgaccctgggcaaaaatcagttcggcaagttgctttgcgattcagcgctaacttcgccgtttaactgcatcgtcagcgacggcggttttgatgaggaggtcgagcacgtcgcagcgcatgaggcgcttaacgtatttgtcgtccgccttcatcgtgacggcatgacctttgagggtgatagccgcaaacacattcgacgacccgatctgatttgtgacacgtatcacgaacttgattttgatatgaccactggcgagcctgaagacgacgcgcaaaaaatccttgatatggtttcagatgttgcattaaaattataaagttaatgcctttattatcaccaccttaacgattgggaaccttgacgggttcccttttttttgttcttaattttgccaaatgaatatatcatcaccttaccatttaactaacagaggttgcatatcatgcgggaattcatcaacgcggcaaccaatagcagcggcggtgttgcccttgcgggatctgcatccgggcaattaatcattgctgccattggtttatttttcatgatcttatttggctcaatcggcacgtggctgaagtggaaagactcaaaagccatccgggaggcgattgattctggcgacattaaagaggcattgaggatcaggagcaaataaaatgggaatgaaaacgcggcttactttcgcggcggcggtggcgatcgcggtcgcgttcctccccgaagtggaggacactaaatacacggtttatacggatatcgctggcgtaccaactgtatgcgaaggaatcacaggcccggacgttatcaaggggaaaacctatacccggtcagagtgcgacgcgcttttaaccaagcatatccaggtagcaaagcgaaccgttgacagcaaaatcaaagtagatgttcctgacaccttcagggcgtcgatgtacagcttcacgttcaacgctggcggcggcgcatattctggcagcaccatgctgaaattaacgaaccagggccgattgcgcgaggcgtgcgagcagctatatcgctggacgtactaccgcaacccgaaaacgggtaagatggagaagtcaaaaggcttgcataatcgccgggttcaggaatatcaactatgcattaaggatctaaaatgattaaggtaattggtgtggctcttacggttgttcttctgtctggttgcgcttccagtgtcccgatcctttccgatctggtgggcagcaagccggatatgacggcgcaagtaggcgcggagaacgttaaacaggcggttggcgtgacgaacaaaacggacacgtcaagcaagcaggagactacgttcaaagagtcggcggtaggaaaggttgacacgtcgaacaaaaaatccgtaacgacctccagcattcacgccaaccagatcacggcggacaagatcgagatccgaaacgatgaaagcggaagcctgactccgtggctgattggtggtgttggggttgtaatgctggcgataggtgcgttcggtctttggcgggaacgaaaaaacaaaggggcgtaatgcccctttttctatatgtaccgcttgacgtgcaatagcgctactccgtcttcatcgttaagaccatgttcaaccgtgttggttgcagccattccttgatagagcaagatgagcgcggcacgcaagtaattttctggtgtgatctgtttcacacaaacaagcctgtgaacttccgttatcagatcttccacctggtttcccgaaaagctgttcatcactgagttggtcaaggtgcatcatctcccatatgtatcggttatccatcccttcgaacgaccggaaatcaaaacctatttccctgttatccggccccgtacaccacacagagccgttttttccgtcaaggtatccattcgtatagcttcgcgctaaaaactccttagagaccattgaggcgaacatacgttgcgatacgttggcggcttttgccagtcgaggcgcttcgcggtgcgtatagacgaacttcgcaaaatcctgccgggtgaactcccggcgagattcgcagaacttgtaaatgtcaagaataaacatcaattacctcatgaacgacgggttgataaagacttcggaatccatcacgcagataaagcctaattcctccatcttcggcaataagcgttccttaatctttttgctcaccccggcctggcctttgaagatcttcaggttgcggcaggcgttataaatgccctggacggtcataacaccttttgcctgtttgcagcgactggcgataacgtcatacatcgctttaatttccgctccctcaccagcaaagccggaagagtcagccgacgacaaatacgttttgctcaattcatggaacataatgatcgcttcgtcaatggtcgccgtgtcgatcttcttcgagcgcttcccgccgggttgccagttccggatcgtgtgaatcacggacgccagacgcataacctgcttatcaaacttacccatcgcgccgcgaagcattgtatgcgaatacttgccgccgtcgcctaactccggttctaactcctggcgggccttgttcagcctacgcattgccgcgtcagtaacctgcaacttaatgttcgactcgctcataatgtcatgaatcagccggaagtaatccgccttcagtgactggtcgatcggctcataggtcgaattcccgttttcgtcgatgaacacgcgttcacccaaacgggtttgctcacgaaccaaaaggaagcgttcagataccccgatcccgcgagagccggcctgcataatggcgtcgatggtttcatcctgggcaattacgcaaatgcagcccaaagcctcgaatgacatattgttgctaacgtcggcacgagcgatcgatacgtggcctttatcccatgctttgagcaccagttcgctgttcgtcttcttaccgccatcgtttccatacgtgatccctaaaaggctgttaaccgccgtcgcctcatcggaaataacggcaaagtttccctgtcggttgttaatcttcgccagaccttccggggtggtatcagataccgggaaagttaggtcacacaatttttctaacttctcctcaagttcgtcacggtcttcaaaaagtttcaccatatcagattgcgataactccccttttagcgcctgcttgttggcggacagcttcgccatgattttcttacgctctttctttcgagactcgttaatgcgttcgacttcggcgacaataggatcgatggcaagcgagttaatggcagacttaccagcggaaggcggctgcgacgtgataacgtaaagcgttgtcggttgctcgctgccgtggtactcgacccaaaagcggcccatcatcgcggcggatacggttccgagaaagtgcatgtaagcggatgattccgggaactgaacagaacgcgctgcatttagcgccagcttgccgacaacatcataatcattggcgatcgagattgttggatacttatccgcgtttacgtcgatatctttgggctttggccagaatgaaacggagtcacgatacccgttcgcacgaatcgcaacgcgcaggggactgatcccctccctttctgcgatggcgataatatcttgcggtgatacgcggtcatttaaaaacatgcccttgctcctgattggttaatcgttcggctaatcatatgccgtattaaatccgagatccagtgataatctaaacacgcttgaaaaacgcgcttggattatcggggcgcatggccccgaacccgtcacaggtatttagcttcgaaagtcgttccgtccgatacactgaagccaacttcctcgcggtacagcgtccagcggcatccatcacgatcgaagatgtatccggcaaccgcgccgagcgcacgaccgctttctacctggtagcgcttgccgacgctgaaggattttttcatcgggttgctatggtcaaggccgacgcattttagcgttttggtttttagttcgatgaacgtcgcaatcacctggccaccagcgccagcaataaacaactcgccgctaacgcctaccgacaaaataacgcgcttcttcttcagttcgacgctgtcatataccatcattgacacattgccttcatcgtcgacgcgggcgggataaaggttattttcgtgtatattaatagcgcggcttgacgtgcatttaatcttgattgacttcgccatttattttctttctccgatctcgatgtacaggtttaccaaatccagaaagtcagccttgcttttgcaacccaacttaaagccaacgtgcgactcaattttattttgcatcgcagccagtgttgcgccgccattattcatcctgagaacttcgcggcatacttcggcgagcttttgagatatcatttcttcaccacctttatttccatgccttcgcaagcgctcttgatatcattaatcagacgattaagccttaaatcagtcattacatggtgatgacgtatatcaataattccagcaacgactaacagcatgacggcaaagataaaaccaccaggcccggacatacacaaaacagttaacatcatcaagataataaatttcatttccgttttactccgttgcgtttcgatggggtgattctacccgactttcgccgggtagttttagaaattcgtgctattctcgataattcgcctggaacacggcgcgggcaaaacctcgcggagtaatggaacgcagcattttagtcctttctgaccttccacccaaaaacttccaggcccaaaagaaattcacgccttctactccatccggcggcgtgagccgtttcggttcgacaaaaccgtttccgtgccatatgcacgttttcttcgtgtaattgtcacagtggggcattttgggatgccacacaggctcgttcggagaaacatagccaccgaagtcgcgcggatggaaataaaaatccggctttcgccatagtgacgataatttcccgaccgggttttcgaccatccaggggcaaccatacttattgcctaattgctcgaccatcttcgcatcccctgctgcggataatacgtcattatcttcccttacgtgcttgattccgctatgcgctaacagcgtgcatggcgggaaagcgaaaatgaagtcaggatctggaatgccgagaatcgatcgcttaacgtcaaaatccttgtcaatccaaatgttaacatactggatatttgggtgaaccattcgaatgctatattctccgtggtcgccggagtcggcgttgaaacagtacaccttgcatcccttgatggcccacggcaggcccatgatgccggagccgtcgaacatgcagtaaataaccttttctttcatgctttccacgcctcaatgaacattctgttcgattccagcgtcagcgtgacgccagccagggaggactgaatgagacgaccgcccggaaccgtcccgatgatgtagcggcctttcgacttcgtgatcgtgatctgagtgaagccggaggcgcggttcatgcggagaacgacgcggccatgagcgttcaggacggcgagaatggaatcagtcttcggatggttcattgtgtagctccttcgtttgttggtatggggacagtatgccactatcccgctgtgttgttttagcaaaacgtgctattccggaacgcaggtcgcgtaatcctggctgatgtagatcgtgcgctgaacgcgaggttcgagatcaccgagttcctggatggtaacatcgttgcttcctacccggcacggaaccgatccgaaaataaactcgccagtctgcttgtcgttgatttgccatacattaccgccttcctttttgacaaccaggaaaggcgcactgtctgcactgaactcttccgggccacgaccgtagtaatgcgtgatcgcagctttggccgcagcgctgaaggcatcggtaacgtcattggtcgccttgtctcggatggccttgatacgttcttcaggcgatccgatgatgtaggaaaagctgttcgaaatggtaactgttcgcattatattttaacctcgttttggtggatgaagtcggcgacgtaatggcattcgatcgggttctcgatacccgccagcacctcgcaagacccgttattcagtagctggcaatgctggcactccgcaccgccaacactggcaatgacaatggcgatcccgttgcatgaaccgccgaacattcgatgagggaagtggtaagcatcgcaggtgcaaaccacctccccggcccgccgtttcctcatacctggcccttctcgatgcagaaaacccaatcacgagcgtcaaccgcaaagcgtgcaacgccgtcgagcaccacgaagacagtaaacccgttgacgccgcgacccttctcgatatcggtcacggtgcggaacagatcgcttgcgccatattgaattttatccccgacgactacatccgcaaatgctttcatggttaatctcctgactggtttcgatgggttaactataccaggcctcgcggcccggcgtttagcaattcgtgcttatttcactgctttcttcgctgccttgtacgcctctttgaaagccggaacatcttcgaccggaatccagaagccggagccatagccatcgtcatagcaagggcattggtcgcagtagtcgccccaggttttctcttctccgccgacagagaatccagtgggcattttgcataacgcttcctcaaccgcttcgatcttgtcggcgtcgctatccatgataacgaagttccacttgccgttatactcgctgcccaggttgattgattcgcgttgaagtttcatagctttagcccctttggctcaattcgtttcgttgaagtcatcatagcaaagccgatcggatggattttaacaaaaaatgctattcctgcgattgctgattattccaccgattcggaatagtggaatagatggtgattgcacctgattccctggtgattagttttgacgaatcatgattgcttttgattgtttcattttgtgcaacgattttgtgagtgtttcaggatttgcaacgaattgcataaa

SEQ ID NO: 235 - DNA, 47809 bp, synthetic construct
  source 1..47809: mol_type = other DNA
atgtctgaagaacgtagaaagcgcgtaacgaaatcgcactttgagggaaacttcaaagcgctatatgaaaaggaatttggcgtcgtgctggggcgcacggcagaaatgacgccagaacaattttttgatatcgcaaagcgttacttccagtgggccgaagagaacgcaatcaaggcggcggaaacggcaacattccagggcgacgttaacgagtggggagtgaacaagcctcgcattttcacgatcacagggttaagcctgttttgcggcgtgaaccagtcaacgcttgggcgctatcgccacgacccgaactatgcgccagttatggagtttatcgactccgtaatctatgagcaaaaattccagcttgctgccgtcggcatgattaacgcttctttcgtcggtaaagagatggggatcgataagccgccagtgctgaacatcgacgctatcgccggggataagaacgagatcaccgaagagaaattagagaaagccgtgaccaatattcttgataagctgtaagggtaggctatgaacgaaatgatcatttgggaagacctgtcgccagccgataagctggcaattaaggcactgagtacgcgaaacttttcgctattcctgaaaatctggttccagatcattcagggcgaaaagctaatgtggaactggcatcactcctacttttgccacacggttgatgaaattatcgccgggaagcgcaagagcacgatcgttaacgttgcgccaggctccacaaagacggaggtgttttcaatccacctcgcgccgtatgcgtatctcaagtgccggaaggttcgaaaccttcagatctcgcagggtgacgccctgtcaaaaggcaactcggatcgcgtgattaagatcttctcatcaagcgagtggcaggagctatggccatcaaagttcgggcgcaagcagatcgatgaatttcaggtcatggacgataacgaccgcgtaaggcttgaaatggtctcccgttcgtccggcggccaaatcgtcggtaagcgtggcgggtacatgacgccgggattcagcggccttatcgcgctggatgatatcgacaaacccgatgacatgttctcgaaggtgaagcgtgagaaaaaccacgtactactgaaaaacaccattcgatcccgtcgagcgaagaagaagaagggcgacgaaacgccaatcctttccgtgcagcagcgattgcacgcgcaggatgccacctggttcatgatgagcggagggatggccatcgacttcgatcgcattgttattccggcgatggttacgcgggaatatggcgaatcgcttcctgactggttgcgtcctgagttcgaacgcgacgtgctttccggcccgtcggtggttattgacggcgtagaatactggtcattttgggaggacaacgaatcgatcgagaaccttgttgccttgcgcgaggccgatctttatacgttcctttcgcagtatcagcaggagccaatcgccctgggtggcaacgtgttcaagtcggagtggtggcgctattacggcgattccgacaaggcgcacgagccacgcccggacaagttcgaatatacgttcatcacggcggacaccgcgcagaaggtcaaggagctaaacgactactctgtaatgtgctattggggcaagtatcgggatcgcgtctacttcattgacggaattcgcggcaagtgggaagcgccagatctccgcgttcaggccgaagcattcatcaagcagtgctggcgtcggaacaaggagtgtgggaaccttcgccggatctacatcgaagacaaggcgagcggtacaggtctaatccaggatttaacaaaggcggtaaacggcatgggcgagatcgtcccggtgcagcgcgataaagataaggtcactcgcgctatggatgcacaaccaatcatcaagggggggcgtgtcgtgctgccggacaatcacccattcgttgcagagcttgaggcggagatgagcgcgtttacatatgacgattctcatccacacgatgatatttgcgacaacgtgtttgacgccgcaaacctggaaatgaacctgagcgacgatccggtagagcgaatgaaacgccttgcgggattgaaaaagctgggtcgctaatacataatgtgggcctgacggcccacacttaaacaaggttgaaatatgaataacattaagatggacgactataatcaaatctttaatggtggcgctggttatgcgtcaaccctcgcgtctatcgcggcaagatttggaacaatgtcgcaggttgaagagttctatcatgaaaacggcatggcgaagaaaatcgttgacgtgatcccggaagagatggtggctcccggcttccagctaaacggcatttcagataacaccaagtttcaatcagaatgggacgggttaaatctggagccgcaaatcaccgatgccctttgctgggcgcggctgtatggtggctcctacgtcctggcgatggttaacgatggtcgcgcattgacttcagcagcgaagcggggtaagccgctcgaatcgatcgttgtttacgaccacgattccgtttccgtcgcagaggaggaaaccagcccgcgaagcccacgattcggaaagcctaaaatgtacgaggtgaagccgctaaacggcgggcaaccgttcaaggtgcactatacccgtatgcactacatcgacggcgagcgagtaaccaacaaggtgcgcaagctaaataatggcgctggcggttcggtgctgaacaagtcaatcattgaagctattcttgactacgactattcggaatatctggcaacgcagctactgaagcgcaagcagcagggcgtttggaaggcgaaaggcctggcgctaatctgcgacgacaaagaaggcgagtacgccgcccgtttgcgcatggcgcaggttgacgctaattcaggcgtcggcaacacgatcggcattgatgctgacgacgaagaatacaccgtgattaactctgatatttcaggcatcccggaattcttgtccgctaaaatggatcggattgtcgccctgtcaggcattcacgagatcgtgctaaaaaacaaaaacactggtggcgtaagcgcaagccagaacacggcgctacagacgttctacaaactggttgaccgcaagcgcaatgacgattacaagccgctgttagaattcctgttacagttcatcgtaacggaggaggaatacagcgtcgagttcgaaccgttgtcgctgcctaccgatgcggagaaagcggatatcttccagaagaacgccaacgcggctcgcggcctcgttaccgaccaggttattgacgccaacgaagcgcgtgatactctgtcggcgttaattcctgaactgaagctaaaaggcaacgctccgaagcagaaaaaacttccggatcgcgccgctggttcaggcagcacgcaaagcgcagagatcttaaacaacacggaggcggatgatgaaagttaacggcagaatcccaaactggcgttatcctgaagcaagcgagcgggatttatcccgctccatgcaggacgcggtgacagaactcgtggtagaaatgcgggatcgcttagaccgcctgaaatttgacgccacggcggaggagatcagccaggcagaagacgatatcagcgaatcggccatcgtgttcttttccgccgtaattgcggcgctttcctccattgggttgactatctatagattcaattctaaacagtggcttgcaattgcgattgcggctggcgggcggaacaacgaatcagttatgcgccttaaagaattcggcgctggcgggtatgaagactggtatcaagattcgttgaggaagtgggaagataccgccgaagcgtcgatcaggaagttagcaagcgatatcgttgctgactggacgacgaaagttagaaccgccaacaacattggcaagtctcgccagcagatcgatgaaatcatcgaagggcgctacgcgatttatggtagctggtcgcgcaaccgggcaagcggaatcatcggaacttttaacagtatgttgatgatgcagcgcctaaaagatgctaaagtgtcgcattacttttggttcggcatgatggatgaccgcgagcgcgaaagccatatcaagctagaaggtaagcgacgccctgttaatggtgatggcattttccccggcgaggagtacggttgccgttgctgggcggttccgtcatttgataatgaggatgattgatggttaactttaatgattactttaatcacgtaggaaaggatctgatatggaagcgagcaacatcaaaccgagtaaaagttggtgatgttgccgggtggaaagatgagcatgggtatgtatacattagattcatgggcaaactgcgacaagctcaccggatcatttgggaaatgcaccacggcacaatacccgaaggaatggaaatcgatcatattaaccatgtaacggacgataacaggatcgagaatttaaggcttgtaaccagaaaggaaaactgtaaaaacgtatcaatgagcgtaacaaacaagagtggagttgtcggcgtgagttggtgcaagagaacaggtaaatggtttgcatccataagggttgataaaaaagagcgattcttaggtagatacgaagacaaaaacgaagccatttcagcaagagaggcggcagaggtaaaatacaatttccataaaaatcacggagataaaaaatgaaaagagttcaaaggttcgacacggtaaagatgaaggcccgatttgatgagaatggctttctggttgacactccgattgtggcgcgtatcggtgcgcaaacgtaccagacgccaaccgggccgcgagtcgagttccgcccgcgttctgaggtgtttgatgctgaatcgctggcttcataccagggaaagccgatcactttgggtcacaagatggttaacgcgcagaatgcgaaaggcctggttgttggctcgtgttccggcgctggcaaagaagaagggatcggggttctcgttccggtaatgatttacgacggcgaggcaatcgagcaagcgaagaagcgcgttgccgctgaattgtcggttggttacacttcggcagatatcgatcgtaagggttggggaaacaacgccactggcgaatatcacttcgatgatgaactaccggaaaacttcgaagagatgaaaaatgattccgtctctgattgggttcgctttgatgcggtgcaaacgaagattcgcgtgaatcacgtcgcgcttgttttccgtgggcgagcagggattgcgaaattaaatcttgatagcgaacaagaattcccctatgatgacgactcaaaccacaaaggagctaaaacaatgatcattaaaattgacggcgtagatgttgaagtggccgataacgtaggcgcttacattgccaaactagacgcgcaagttgcatcggcaaccagtcaggtaacgagcatcaccgcagagcgcgacgcacttcaaaccaaagttgatggcattgaagatgaagttgccgcccgcgttgctaaaatcaaagccgacgaagacgcaaaacagaaagttatcgcagttgtttctgccgctggcgtcaagtgtgacggcctggatgttaaggcaatgaaagttgcttacatcaaagaggtagacggtcgtgatctgtctgacaaagaagattcgtacatcgacgcttcttttgactttatcgccaactctgataagatggctggcaatcgctccaaagtcttcggcaaaaaagaagatggcgagcaaaaagacaaaggcggcttaccgaaacttgacggcaccgaaatcatcgatccgcaggcaaaattccgccgctaataatttgcggccttcgggccgctaccagaccaaataaacaggagattcaaaatggcacagattccagcttcttattcccgcaagcgtgatattgctgtagcggggcagatcgctgatacgtcactttacaatatcgacggaacttgtgttgctgaaggcgatatcaaagctggcgtactggtggcttccactggcgcagtttccaatggccacaaggtagttaaaccagcaaccgcagcgagcgacgtcattgtaggcatctcgcagttctcgcaagcctactcgcctgaaggcaagtatgacgatgagagcgcagttaacgttatgactcatggccgcatttgggcgatcgctgacgcaactgttactgaagaagattgcgcgttcggttctttcgtcacctttaccgcaaacggcacagtagcgaagggtgatgccggggttatcaaaactggctacaaacacactggcgaatacaccaaaaacgcagatggcactgttctggtgaaagtgcaggtgctttagggcgctgtagctccagcggctacaactggcgacgctggcgtataaaataaggggcttcggccccatttttgcaccagaaaaaaacctttgacggcttaacgattcgtgatattcttcatctcgttaagctaaatacacaaacaggagttttcagatgactatgaaattagatgcattcgaacagagtgccattaaggtcgcaatgcagggcatgggcattgatgccgcaaaactggatgcttacggtatctggactgttaagcagatgactcaattactgaatcgccagtatgagcaggcatacccgcagaccagcgcacttgagcttttcccggtaactaccgagatctcgccgaccgcccgccgctttgagtggctcgaattcgatggcgtaacttctgcgaaaattatcgccgattacaccgacgacctgccgaccgttgaagcgatggcgaaagagaagtcagggaaagttttccgcctgggtaacgcgtggtttatttccatcgacgaaattaaaactggcgcggcgctgggttccagcctgagcgatcgcaaggcaactctggcccgcgaaggtcatgagacgctcgttaatgatctggtgttcaaaggatccgctcctcacggcatcgttagcgttttcgaccatccgaacattaaccgcatgaccgccagcgcggcttggggcgatgacgcagcagcggctgaaaaggcattcgaagatctggaagacctgctaaacatgatcgaagaaactacgctgggccgccatcacgcgaccaacatcgtgattcctccgtctaagcgtcgtcttctgacgaaaaagatgcctgacactagcggcgactcttatctgacctggttcaccaagaaccacccgaacatcaccattacggcgatggcggagctggaagatattgacggcgcaggcaccaaaggcgtgctggcatacgaaaaagacccaatgaacatgagcatcgagatccctgagcggttcaacatgctgccgatgcagccgaaagacctgcatttcaaagttccgtgcacctccaaatgcactggtctcatcgtgtaccgcccgctgactattgcgattctcaccgggatttaatcaaaagcgccttcgggcgcttttttattgcattgcattctgcaatgtgctttaatttgaaacctaaagtaaaccaatggagcattaacaatggccagtaaaaaagaaaccgtagaaaccgtagaaaccgtcgaaaccgtagaaaccaccagtgccgaacaggcgtcgcaggttgttcaactacaaaacgttggtgcatgtgcaattcgctataaaggcaaaaattacgtctatgagcaggtttttgaagtgccggaaaacgaaatcgaccgattccgccacgaaatcttcaaaggccgggtcgaattctacgacaatccgaaacgcacgcgcgaatacatcgcagcggtgaaggcgaaagcgaaagagatcgtgcagcctaaaagcgcggaataacaaaaactaacaaagggcgcttcggcgtcctttttcatatcaggagagcgaccatgaattacacaattcaagatgtgatcgataaaatgcgcagccttgcacctccgcttaaagaagttccagatgaactgctgtctgcgtgggttgtgcttgccgaagagttcgtttgcaaatccaggttcggggattccatcgttacggcgatcgcattgatgaccatgcacctaatgtttttggatggagcgatgaagcaggaaggcgaaagcctggaatcttacacgcagcgagtggcatcgttcaccctgaccggggagttttcccaaaccttcgatcgcgtatcggcgtcaagcgacaacgaaatgctttctacgccgtggggcaaaatgtactggcgtatgctcaaaatgcgaggcggtggcttcggcctccttaccgccgggaacgtgcgccgctgcggaattggtaggtgatcgctatgaactacaaacaaatccaggcacgcgcaagcgcgggcattaagtttttcagtgacgctgacggcgtattcaacaagtacacgaaaggcgctggcggcggaatcgatccggaaaccggggaagatatcattcctggcgaggtggtaacgacaatcaagggcgcgatcagggatgtaaattaccgtgacattaacggcgaaaccatcctcgctggcgataagcgcgggtttttcactcatgatgtgccaatcatggagggtgacgaaatcgaagtagacggcgagcgctaccgcgtggttaatgcccgtccggtaaaaccaacgggaaccgttgttgcttaccgtccagttttgcgcagggtggcgacttatggctaattacacgatccgggagttcacaggggcaattgatgcatggtgtaaggccgctggtgatgcgctggaggacgttgtaaggtttacgtgtgaagatattcaccgcgacctcgtaatgcgttctccggtggatacagggcgcttccgtggtaactggcaaatcacctttaaccgcgccccgctttacgcgattaacgcatatgaccaaactggcgaaaagacaatccagaacggcaaagccaacattgcactatacgcaaaaggggctgggatcacttcgatctggttcagtaacatgctaatctatgcgaacgcgctggaatacggccattcaaagcaggctcccaatggtgttatgggagttgttgcgatccggttgggcgtttatgttactgaggcaatcaagcgagcgagggcgaaaaatgcattatgagatggcgttaaaatgcaaggcggcagtggctaaatttgccgccgagaacgggttaatggtcgcaggagataacgttgactttaagccaccaaaacacggtgaaacttatctcaagttctcctacgtagaagcggattccagatctgtcagcctttccagaacttgccgcgtttatctggctatggtgcagattgacgttgttttcaaacccgggatcggaaccgacgccgcgcggctaatcgcgcaaaacgttgcaaaatccttccccgaaggcaaggttgttgattctgaaagtaagttatatgtgagcgagtgggcggaagtgtaccgcgttcagaaacacgaaacaggctggctcctacccgttcgcttcacagtaagatgcgaaagcgcggaggagagcggttatccatcaacatgactggtcttagaggtgcttataatttcttgccagcctgtaaatatataggcataatggcgttgttaaactttcatcaaaacaggagtattcaacatgcatttaccaaacggtgcaaaggtcttctttgagaaggctcgcggtgcggccattccgtttaccgcaatgaccaacgacgcgaaaaacccaaaaatcacagtggcggacggcaagctgaaggtgaaagatattgtgatcttcaccgattgcacctggggcgacttcgttaacaaggtggctcgcgtaaaagcagtgacagcaggtgtggcaacgctggaagagttcgatacctccgacactaacaagtatccgggcggcgcggccactggtaacgtgagcgtgatcactgattgggtcgaattgccttgcattcaggatttaggcaaagacggcaacgaacagcagttctataactatcagtgccttggcgatgagcgcgagcaatcagaacctacttacaagtcggcggtgacgcttaactacacgtttgcgcacgattacagtaacgcgatctaccctgtgttgcgttcagccgacgccagcaagcaggcgagagcgatgtacatgtatatcccgcgagcttccgaggttcgttactggtctggaattgcatctttcgatgacattccttccacggctgttaacgagatggaaacggtaacgcttaacattgcgcttaaaggtgctcacgtcttccttccggttgtcgtgtaattaaatggcggggcttgtgcctcgcctttttttgtgcataatagcgaataacacaaaccaatcaggagttaacaaaatggctaaattcaaaattcaaattggcggcaacctcccttctttcaaactgcccgtaaccttcacttgcccggatggcaaagaagcgaccatcaccatgaccgtaaaacatcgctccaccgatgagatgaaagacttttatgagagcgaagataaagcgccaaagggtaacgccgagtttatccgctttatggccgaaggctgggatcttgatgatgagttcaacgacgaaaacatttcctggctttgcgctcacttcccggcgttcgtcatggcactgccacaaacttacatggccgcgcttgcgggccaccgtgcaaaagtttaaggcgggctgtttatctcacgcttcagcctgagctaaccgatcgccagcttgccgagtacgggttaaggcgatcggattatgaggcagatcttgaaacgatctactttgatgaacagaccgcccaaagctggcagctattccaggccatgcaaacgcagtggcgcattgggatgaacggcccaacggggcttgactataatacattgcctatgttcttcgaattgtataaaatcgacaatcgagaagcggcattacttgacttgcaaatccttgagggtgaatatctgaaggagatttacaagaaatcaaaataagcgcctacgggcgcttttttcatatgggggctaaacatggctgataaagtagctgggttgacgtttggcgttgacgtttcgcaggttgataaagcggtacgatcactagcagaactgaaaaaccaaagccagcaaacaggcgctggcctacagtcacttgcggacgctgaaaggcgggccacggcgcagaccgaggaaatgaaccgcgcgttgcagcgccagaagcaagagactgacaaatcaaaaaccagctttagcaggatcgcaagcgccatcgatccaacgatcgcaaaaatggccaacttgcgcaaagcgacggaagaacttgataaagcgtgggcgctgggtcttgttccggacaaggaatttttccgccttggcgctatcatcgagtctaccaccaaccaactccggcggcagcaggcggcgctaaccgaagaaggtcgcgcagcaatcgcagaggcggaggcaaagcagaaggcggcaaacgccgggcgtgattttgtcgccagtctgaaacagcaggctgactccatcgggaaaacacgcgccgaactgctggaaatgaaggcggcgcaattgggtgtatctgcggaagcggccccgttcattaatgccctgaagcagcaagagcaggcgttaaagaaacagcagaatgcgatgggcctggctggcatttctgccgggcaatataaaatggccatgcgccagttaccgatgcagatcacggatattgtaacttcccttgcgtcaggtatgccaatctggctggttgcggtgcagcagggcgggcaaatcaaggacagcttcggcggcttgagcaatacgtttaaggtattgttgagctacattaacccgctaacggttggtgctgcgtcgttgggtatcgccctggcggcaatcgctaaagctggttatgactcctggaaagcgcaacgagaactggcgaatgcgctggtgctgactggtggctatgctgcgaccaccaccgggcagatcacagccttaaccgaagagattaacaaaaactcatcggctacgattggcagcattcaggaaatcgcaacatcgctcgccagttctggtaagtacacaatcaaccagattaagcagatcacgaagactacggcggaatggtcggcgcagacgggtgagagcgagaagacgatcacagggtattttgattcgatcgcaaaagaccctgttaaggggcttgccgatctcaatgagcagtttaatttcctgaaagagggccagctaacctacatcgaatctttgcgtaaaaccaaaggcgagacggcagcagcagaggcggctacaaaactgtttgctgatactatggataagcgccttaaagatatcgcggacagcgcaacgccactcgaaacgatgtggacggatatcaaaaaatgggccgctgactcatggaaatgggtaggcgatcacacggtaggggcgctaaaccttatcgttgatacggtttccgcgatcattaacacgatcaggaagctgattgccgacggcgacgccatgatcgcgcagttcatcgttgacgctggccggaagctgcaaaaaattccaggaatgggcgactttggcaatgaatttctggcgcagcaggagcagctaatcaaggactcgaaagcgaaatccgacacgcttgcaaaaaccattgcggaacagcaggcaaggatcgcaaaaggcgaaatgggttacattgatgccgcgaaggataaaaccctttccggtgggtacagcagcaaaacgaaggatcgcgtaaatcaggaagaaaaagatatcctgaaaaaccgcaacgccaggaagcagcaggtagacgcgggcgttaaaattgatgagcagtatcaggctgaactgctatcgctacaggcgcagctaaaggttttgcagcagcacaaagggcttgacgacaagatcagccagcagcgcaaagactacttcgagacggttgctaaattccaggttttggaagaggcaagccagaagcgaaaactgacccaaagcgaacagcagatgctggcgaacaaaaagaatatcctgtacatggcggaacaaaaggccattgtgggagatcagattgttcagcagcagcgactgaacgccttgcttgacaagtctaccaagtatcaaaaccagatggcggagaagaccaaggcgctacaggataccgccggaatgggtagcaaggagcaggagagataccgggccaatgcgcagatggcggctgactggaaaaacaacggcggatctttaagtgaccctggatttaaagcgatgcaggccgcaagcgataaattctacgcacagcaagatgcgcaaatgatgaactggaaggccgggtttactaacgcgtgggctgacattggcgaagaagttaatgacgtatacaccaatatcggggatatcactaaaaacgcatttaacggcatggcgagcgtgctgactgattttgtcatgactggtaaggccagctttagcgacttcgcaaagagcgtgatcactgacattaccaacatgcttatcaagatggcgctgtttaactcgctttctgccgcgtttggtggtggtggaacgttcagcttcgccagcatgttcagcaaaggcttttctggcggcggttacactggcgacggcgggaagtatgagccaaaaggcgttgttcacggcggggaattcgtattcaccaaagaggcgacgcaaaggttaggcccggaaaacctgtaccgactaatgcgcggctatgcaagtggcggcctggttggtggtaacgcaagttccggatctggaatcaccaacggcggcaacgtcgcggcgtcggcggctatggtgtttaccattggtgatattaacatcacgatgggttccggtcaggatagcaaggggctagagcagggcgtaaggcagatcgtgaacgatatgttcaccgaggctttgagccaaaacgggcgcattgcgaagttcgtcaatgagaaaacgaggaggtagtagtggattcctttaaatggtgtacacaaatccaaggaggggcggcgaaagtcgccgtatccaataacgttcgggcgatcagcttcggaaatggctacatccaaactgcgtcgagcggcattaacacaaagcgccggactgttccgatcgtttatggcggttcggattgggaagcggtttataacttctgtcaggatcacgtaacaaagccttttgtgtggaaggcaccggatggaagaatgggcgtgttcgtcgtaactgccgactccgttaaccttgcgccgcagggtggcggggtgtttgaggtaacggctgaattcgccgaacgcttcacttcagccggataatcaaaaagcgccctttacgggtgcttttttttggcctatgatctggagtcaattagaggagggcttacgatgacagccaatgtttcaaaagattttgcgaactgcctacaaaaacttttccccggcgagatcctaacgctgatcgatatcgacgccacaaagttcggcgggcaggtctaccgattccataacgagaacgtcgcctatacaaccgaggagcttttggccgcggttaacggcgggacgcttcagccaaagatgatcacgtttcgcggcgagcagtacggcccgcgaccgttcggcctgggcgggatcgcaatgtcgagcgatggcacagtggaaaagccaacgctgacggttagcaatattgatgcgcaagcgagtgctcttattcgagcctataacggccttatgcaagccaaagttacggtatgggttttggtcaaggaattgctacaaaacgacggcagcgttaaagagggcgattttaggcgatttatttactacatcgagcgcccaaaacaggtcgacccgcaaaaggcaacgttcgaattaacatccgtgtttgatatggatggattaatgatcccggcccgtctgacgcaaaccgtttgctattgggcgcagcgtgggtggtacaagtctggcaaaggctgcgactacaacgggcagaacggatacttcgacaagttgggaaacagggttgaagacccgtcgcaagatgtttgtggcggcttggtttcttcttgcaggcttcgttttggcaatgaaccgttgagttttggcggttgtgcgacagcaacattgaaaagtggaaggtaatatgttaactccgaaaatcaaaatgcagatcatgcagcacgcgaaagaagtttacccgcatgagtgcgcaggtctggtgacgcaaaaatcacgagtgcaaaaatatcaccgactcgacaacgtttcgccagatcctgagaaagaatcaatgcctgatgaaacgcagtatgcgctggcatcaatggagggcgagccgatcgccttcgttcactcccacactggcgatggggcaaccacaattccgagcgccactgatttatgcttttgcgatgagtctggcttgtcgtgggttatcgtctccatcccggaaggtgatatgcgaatcattgagccgaaacgccgacctctgattggtcgcccctgggctttgggcgcttacgattgctatggcctaatcatggattttcacaagcgccacggcgtcacactaaaagatcggcgattgccgttcgaatggtggaagccggaatacaaagagaatctttaccaggattactggcaagaggacggattcattgaaaacactggcgagcctgaagttggcgatatgatcatcttccagattcaggcggaaaagtggaatcacgctggtatttacgttggaaacaataacatccttcatcacgcgtttggcaagctgtctcgcagggatatctattctggatggtacgagcagcacaaggttttaatttgcaggcacaaggagcttaaacatggcatcacatacaaagacgattaaactatccggttccctggggcgtcggttcggtgtcttccacaaacttgcggttgattcagtcgctgaatgcatccgggcgctgtcttaccaggttgaggggtttaagcctttcatgcagagcaaggttggtttaaatatgcgcttcggcgttgtcgccgacggaaaaccaatcagcgcgaacgaccttgcgacttttgccgtggcgagggagatcagaatcattccgatcccaaaagccagaaagaacggcgggttgttgcaggtcgttatcggagcggcgattatggttgcggccttctttactggcggcggctcgctggcggctatgggcgctttttcatcggctgcattcatggctggcggctcaatggttttgggtggcgtaatgcagatgatcgcaccgcagatgggcggcaatatgcgggcgagcgaatcgcctgagaataagccatcgtatgcgttcggcgggccgattaacaccacggcggcaggttatccaatccagttgccatacggttacagattggctggcggcgcattgttcggttctggatcttacgcagaagacaacaactaattaagccattcgctttttagcctgggggcgtagcctccgggctttttgtcgtgtacaattgcgagactattaacaggaggctaaacgatgactaatatcaaggcccgtaagggaggctcaagcaagccgcgtaccccggtagaaatgccagataacctgatctcaaaagacaagatcaagttattgctggctgtttctgatggcgaggtcgttaacgacttcagtttgaagcagttgcatttcggcggcgtcccggttcaaaacgaagatggaagttacaactatgaaggcgtgattgctgagtttcgccccggcacgcaaacacaggactacatccagggcttcagcgaatcaagtgctgagttccaggttgctcgtgaagtcactcacaacacgccttatacgcttaccgtatcgaacaaaaatctgtctgctattcgctttcgcctgttatggccgcgcgtgctgactcaaaaagataacggcgatatggtcggatcggttgttgagtacaagatcgagatggcggtagatggcgcaagttatcagacctacctaactggcaaaattgacggaaagaacacgactggcggttacgatcggagcattcgcgttaacctgccgcaaaacttcacgtcgcaggttcttatccgcgtgagccgagtaacgccggatgctgacggggtgaaggttgtcgatgccttccaggttcaatcctacgctgaggtcattgatgcaaaattccgctacccgttaacggccatgctttacgttgagttcgatagcgacctgttccagaaccagatcccaaccatctcactcaaaaagaaatggaaaattattcaggttccgagtaattacgatccgattaatcgcacatactccgggacgtgggacggtgtttttaagtgggcgtggagcaataacccggcatgggtgctttatgacctgatcatgaatcagcgctatggtttagaccagcgtgagttaggaatcccggttgataagtggtcgctgtatgaggtggcgcaatactgtgatgaacttgttcctgataatcgcggcgggatggaaccgcgctatttgatggatgtaattgttcaatcgcaggttgaggcgttccagttggtaagggatatttgttccgcgttccgtggaatgacgttctacaacggggaaagcctttcgattatcgtcgataagccgcgcgatccggtgtacctgtttacggctgataacgtcgttgatggcgttttcgttcggacgttcccaagcgaaaagacgatgtacacgtcgtgcaacgtcatgttcgacgacgaagaaaaccagtacgaacaggatgttgaaccagtattcaaccctgacgcagccatgcggttcggccacaacccgaccagcattacagcgatcggatgtaccagaaggacagaggcgaaccgccgtggtcgctggattctgcaaacgaacctaagcgccacaaccgtttcgttttctactggcctggaaggtatgattccttcttgcggcgatgtgatttacgttgcagatccgcattggcaatcggcctttaacctggtgctatcaggccgcgttatggaagtgtctggcgtgcaggtgttccttgcctaccgctgcgacgcgaaggctggcgacactctgatcctgaatacagacgacggcaagccagtgcgccgcacaatcgccagcgtttcggcggacggtaagaccatcacgctaaatgttgggtataactttgacgttgcgcctgacagcgtattcctgatcgagagcgatcagcttgcagcggaacagtatgtagtaacccggattgaaaagggtagtgatgacgacgaatttactttcgccatcacggctacgcagtacgatccgaacaagtatgacgcgatcgataacggggtaattaccgatggccgaccaacttcggttgtcgaccctgattcaatgggcgcaccgaaagacttaacgattagctctttctcccgcattgttcaggggatgagcgtcgagacgatggttatcggatggtctgccgtgcagtatgcaaaactgtacgaggtgcaatggcgcaaggacggtggtaactggaacaacgttccgcgcactgcgacaacgcaggttgatatcgaaggcatctatgctggcgagtatcaggcccgcgtgaggtgcattagcggtgggaatgtagcgtctccgtggtctgaattggcaaccgccacactgaccgggaaagtcggagcgccaaaaggcccgattaacctgtttgcgtcggacaatgagatcttcggcattcgagttaagtgggctatgccggaaggagcggaagacacggcatacattgagctttaccagtcgcaaagcggaaccgatcaggacgcaagcctgcttactctgattccttacccggcggctgaatactggcactcaattttgcccgctggctacgtgaacttctacaaagccagaagcgtagaccggatcggcaatgtttcagaatggactgattacgctcgcggcatgtcgtcgactgacgttaacatcatcacagatgcgatcctggatgaaatcctggatagcgacgcgatgaaggaactacaggaaaacgcacaggatagcgcggcaaaactcaatgactacgcgaacagcatcattcaaaatgcgctggcgaatgatgcggacgttaggaaaatgacgaaggagaacggtaagcgtaaggcagagatcgcgcataccacggtgctgattgccaacgaatcagaagcgagggcggctgaaattacgcaacttaaagcgcagattgatgaagatatcacgtcgcagattacgatccttaacgaagccctggcgacggaaagcgagacgagagcaacgcagattggtcagttgcaggcagattttgcggctgatattgacggcgtaaaaacaacaatgaacgctggttttacgcaggttaatcaggctattgcaaatgaaagtgacgcgcgtgcaagttccgaggcggcactagatgccaaaatcgggcagaactccgcagcgctaaaccagaaactcgactcgtgggcgaacgttaatggcgtcggttccatgtacacgatgaagttgggcttgaggtacaacggtcaggagtatagctccgggatggccctacagcttacctcaagtggtggaagcgttgtttcgcaggtgctgttcattgctgatagatttgctatcatccgtaatgcggcgtctggcgcgtacacgctaccgtttgttgtgcagaatgaccaagtgttcatgaataacgcgcttattcaggacggttcgattaccaacgcgaagatcggtaacgtcattcagtccaacaactttcaggagaatgttgcaggatggaggcttgataaaaacggcgtatttgtcaactatggctcaacttctggcgaaggttccatcaagcaaacgaaccagaacatcactgttcgagatggtagcgggcgcgttcgttgccagttgggtaggatcactggatcatggtaaaattaatgccgggagaaatcccggcttaaccaaaggaggcagacaatggcttatggttttcaatcatgggatgcgaacgggaaccccaacaactatgggatcgtccctgtttcagttgctggatatattgcattagcgcaaggccagaaaagcggaacgtggtattacaacgtcccgcctgggttgaggcttggtttcttttgggtcgcaaatcaagaccagtacggcacatcgaagaggcgaattaccgttagtggtaatcagatcgttgtttcagatgcgccagatgatgcgctggaatcaggcgtctacccggcgacgcaaggttttattgtcgttcaaattatgagttgatgattatggcagattacggaattttacttaccaatgatagcggcaatgtttgggtttcgcctcaaagcatcccactggcactactatcaaagcagagcatcactcttaggggtggtactaactccgatgaagtaagatcggtaacttacgacacgaatcacccatgcgttccgttcgtggtctttcatggatcttcgccacaaggtgcattcacaaaaatcaagtacagcggaaacacttgcagcgttgttttttcttttggtaagcaaaacgtatatgcggaggtttattttttctccgtgttcccacagccaaatcctggttatgggcttgcaatttgggatgaaaacggcacgctgattttgaccaatgaaaccagaacactttcagacgtacagacctacggcactggttttaatctaaacgtcactaacggcgggaagtgggcggttagtcctgttcagttaggcgcgatcgttggtgttgttcgcgatccctacccaagaccatttcagggcgactattgcgcagcggcattctttaacggctcaagcacgcaacttaccgcatatctaacgcaggcaccaggaggagccgccagcgatctaacctacgtcaatatgaaaaacacctgcatcgctattgattgcgcaagatacgactaaaagaaaggggccatacggcccctttttctaccccttgagatttttgatctcctcttttaattcatcaacttgagcagacagagctttgattgcgcaaattgcatccatcaaaagagcattattgtcaagcacaagtttcttattttcaactacgttaccctcatcatcctgataggatgcgctgctttctttaacgtagcacgaatcgatatctcgcacctgctgtgcaataactcccctacgctcgcgtttcttaacatcatccttataggtgaacttgaccagattcattgctttgatgttttcgagtgactgcaaaccatcataagcaacaacattgtctttgtagttaatgtcagatagaccagcaaaaacaacgttgccataagcagtgcttgcaatattaccatctgatttaaactgccaatactgcgtattaccgccagttccccatttgctgacctcaataacggcacgatgttcataacccctatgttcctcaagccacatagcgcaacgcgcaccgttaccattaatgttgaaccgtgagataaatgatggagatttaaggatatcaccattattcccatttggatcgctagttggccacgctacaaaagcatcattaacggtactcctcacagtcccatatgacacaacacttccgcgaagatcggcagccccgccaactcgcaacgtgctcgacattgtaacagcgccgcgaagatcggcagccccgtcagcacgcaacgtgcttgacattgtaacagcattgctaaagtttgcattcaacccggtaacagcaaagttcgatgcatcaaaaacaacctgcttcgcgctgttcatatctccattagggcggaagtacattccttgaccattttcagggattgagtacacgatcgcattgctgttatttgccctaatagtgcaaccgttcagggtcagcgtggcgtttcctccaggaacgctaattgcctgcggctggctgaacgtgttagctacgttggtgcgcgggatcgtattatcattagccatcaaatagtcagacggtgaattatatacaattccagaaggctccgtgtcaatccaggtataaccagtgcgatcaatgattggccccgtaatcgaccctttgttagcctgtacgtttacatgattcaaccacagttcaggaacccatccgccgggagcatgaatataaacatcaaacgaggagtctgtgtttttcaccaccccaagattaatgcgtctggtgtcgtttggtctggcagcaatcagggtgcgctgagtaaaccaagtgtcaatattattactggttagcgtatcgggaagaccgcggccagaaatcgaaaagatatcaaccgggagatttgcagtgccataaccagtacctccgccaatgatgaactgagcaaatgcgtagccatcaccagcgttcttgacgttggcgatcttcatccacttctccccagcgaaagtgccagtaattttatccggcacctggacgccagccacaaggtcgacaacctgatcacgaagattttgcgtctgccccttcgcagtttgcgcgtcgttcttcgccgagttggccgcagtttctgacgcttttgcattggtctccgaggttttggctgcggtttctgatgcctttgcattggtctccgagtttttggccgcagtttctgacgctttggcgttggtctctgaggtcttcgctgcggtttctgatgcctttgcgttagtctccgacgtcttcgcagcattcttggatgcagcagcattggtctctgaagtctttgcagcggtttctgatgcctttgcattggtctccgaggttttggccttattctccgaagatttagcgttcgtctctgaggtcttcgctgcggtttctgacgctttggcgttggtctctgaagtttttgcagcgctttcagacgcagccgcagccgtagcgcttgcgcccgcagcttcggaatctgccctcacctgatcggcaagactttgcagagcttcgaaatcgaagttcttaaagaagtcgacagcatccgcaatttgagtttcctgtgactggtagtagcgcagagtttccgcaacatcttgcgccagtccgtcaacggtcagcgagtcacttaacaggatcgcgtaatcgctagacgctacgacagcgccttttgtggtgatggctttaatttcagtatcgctaaccaccttgtttacgacggccatttgaattggtgacgacaaaaacataatcgtcgcaccagggcgaatcagcgaaagcgatgattgccattttgtgccagtcccggtaacggttccgtctgcggccatagccgctttgccttctctgtatagtgccatgtttttaagcctcattggttgattgagtaacgcagataatagcatcaatgaaccgataaaaaaaggagcctttcggctcctttagttgtcaaattagaacgggatatcatcatcgaaatccatccccgcattcccgccgctgttttgcggcttaggcgcttgttgcggcttgggttgttgaggctggccccacccggattgctgattgccgccgccgctttgcgaaggatcgcgctggctgaattcgagttgcggcataatcatttcgttgtggctgtaaattgtgccgttgtgctcgcggttaacgatctgaagcgtccggcaggttacgctgatcaccttatccatttgcagcgcttcgtcgtaccacttaatcatgttttcttttgcaaagaaaactgcgcggtagttcgtgtaaattgtttcgtcctcgccatcacgattgcggatcttcatccgctccgacaggtctacggcgtacattttccacggcccgttattgttgctgccctctttgacataaggcgcttttcggattacccctgttacaacatgcattgtcattcctatggggcggcttcccgcccgttaaattagttgaaagatgaaatatcttgcgcttctggttcaggttttgattctaccttttccggctcgcgcttcgcaacctcttgcggtttaccggggttaaatccgtttgccggggtgactttcagttctgcctggcgtttggtgatatcgtcttccgtcattttccactccgccggggttaacgtttgtttcgccagcttatagatctcacgaagcgattcgagatcttcgcacgcgtcaatgcgttttttgaagtctttcggtgtcattttcgtaatttctgcatcatcatccgcctgcttgatacctagcgctgcggccagcgcataacggcgggcgtaagatgttgttgagccgtatgcttgttcgacggttttactgatcggcatattgtactgaaacgccatgaactcgccgctttcatgcaaaaacatagtttcgaggtgcatcaccttttcggtgctcgtatccatcatggattgaatgaccataattttgttcttctccagcgccggggaaatagcgtcgaggatatccccaagattcgcataggtgttcccaagatggttgttcttaccgcttttctttgcggccacgaagccagattttgccttgattaatgcggctgcgatggtggtaaatttttcagatgtacgcatgataaagtttccttttcctaattggtaatgcgcactatatcacaagtgcgcaccagtgtttagctatttgtgccgtatacgtccgggaacatgtatttcacaaactgaggagtcggcaaaacaacttccgccgcgtttgactcatatgatggccatgaatcgtgcttcacgcattcagcatactgatgaatcacgctttgatactgtttgcgaccgatctcgatctgctggctggtcagggtgaacgccagcggagcaaacggtgattttttctcctgcgttagcagtctgacaactaccgggcgtttttcgttgtaagtcttcacgaacagatcgcgctgcaatgccatcttgagatagtagcccaagttgaaggcgagtcgcccgaaatcgtcaggcttggaagattgcgtggttttgtagtcggtaatcaccacgacctcgaaaacctcatccgggttgaacccccactccttgatgagttcgggatcggaaacaacgtcaacatgatcgagtcgaaccttaaccttgacgccgaagatctcaccgaagattgacaattcacgctgtgctgtaggcgattcgatacatgcggcgtgtcgcgggttagccagcatcacgctgcgcatttgaacaacggcatcgaaatcaacatccttaaccagcttgcgcccggagtttatcgcggcgctttcgtcgcacagttcaatagcccaccaaacatttacgtcaatcccggcgcgatatgccatttccagaagttccgggtaatccttgttggacgtcccaatcaggccacacgctttcagcttcgcagacagtgccgacttcgacgtaatcagatctttaacctcgcccggagaagtcgcccgcaggtactcgccattaaactttgccgtctcaagcatacaggtatgcgaacaggttccgaacgccagcgcggctgcttcctcacgcactttgaatttccagtgcgccggggatgttgcgtaaatctcgccgaggcttgagccgctaacgtattccgcgcaccaggagttaggatcgtggtaatcatcgttggataattccgcgttggtgtatgccttaaaaattgcttcagccattggtatcactccatttgtggtttcgttgcgttaagtatacgcatgacgattccaggcgcaagtcaaaaagtgctatccgcagttggttaaaaaacgagcgaaatttacgtaagatttagtaagatgcatcttacgtgatttttcctatatatttcatttagttaatgcaaatcggtaagatggtaatatccctataggtaaatatccatgaaaaatatggcgcgaaatccagcgaaaaaagacacgcaccccggagaaatcttaccaagattgatagatacagatagagtaataataataatattgttatttatcatatacttactatctatatattgcggttaattggttaaattttgcgcgaaatttacgtaagattcatcttactaaatcttacctaaagtggttcgaccagctgcaagccactgaatttcaggcataaaaaaaggtaagactgatttgctcaatcttacctaaattctggtcaacatttaatcatagaagcgacgatgccctgtacaacttgcgttcaaatccgagcttaaagttgtcaccgttcggaacgataactttaagatcccgatcgtcagcagccgccagcatatcccgatctccacgacggcaaactacccgcatttctcgcttaccttctccgccattgcctttatacctgtacgccacgatctcgacgtttgaaggtatgatgcaggcccaaacgtcgcacttgaacgaactggcaatattaaagtgcatcgcctcaatccaggatcgagcaaggtaaatcggcccgttaccgtcgtcgctctgattggtcactatcaccgatccgaatgtcagatcgccagccaacatcttctcccgaccctcctcatcaatgaacagcatgttgcaatactcatcatccggcccatcctcatgcactagttgcattggtagcgcgtgaattagctcctgtctgcagttctcgtgagtttttacgccaaccagatatgatttgatatgctcattttcaatgccctcatagagcgttacaggcgtgctatcgacggcctccgttctgtttaaaactgccatcactctttcatgatctgccatctttccgtagtcatacccgttatcacgagctacctgcttgtttctcttgactacgtattcttgcggaacctttccgagatagcgcccaagaatgttgatgcactcgctatacggctggccgcttaacttcattaaccagccgatccccttatcggcaccgcaaccgccacagtatgcgccgccatcacctcgcgtttccagcttgtcagtccagcggaatcggtctttgccgccgcagttcgggcagtcctggtgcttgccgttgaagtatcgagagtggatgccgcaaatgttctgcaacgcctcgcgccacatgccagccatgtacggcaaaacctctttttcatcgtaaaaatccacgtcgtaacccccaaataaaaaacgcctacacgagaatgataacccggcaggcgtttagtgtttagtcaaattgtgctatcggactacgcggagcatttcgcggcggtcgcatcggcgcgtcactggcttgccgttgctgtcaaatcttaaatcaggtcggcagaatgaggcgcgaaaacctttgcaattgttccgtcggtagctcttatgtactagataagcgccatcggctgagatcataccgcgcttacgccactgctgaacaacctggatactaactcccaactcttttgccgttccagcgataccaccgaaggcatcaataaccagctccatccgcgcagtcaacccagctcgaacctcatccttcagcacgtagtaaccagtcggtcgcttgcgtttcttcttatctttcccgcgcgacgttccgttgttgccgttcaaggttcgcttatcaaccattgccatttgctccataattcaaccctcatagcattttttgttaaacctgataaaatgttccatgtattatacacgcaactatgcgaatgacaaattaggattgacaatggcaagcacagaagaagacgtagcatattttaagcgactatttcgttatgaaggcggaacactgattcgcaaagttacaaccagtagtcgtgcattcgctggagactccgtagggtgcgagaacaacgttgggtatttacaggtaagcgtaaaaagcaaacccctatacgttcaccgaatcatttgggaaatgcataatgggcctatcccagaaggaatggagatagatcacatcaaccaggtcagaacagataacagaatcgaaaacctgcgactggtaagccaccaagtaaaccttaaaaaccaatcgatgaacagtggcaatactagcgggcacgctggcgtaagctggtttaagcgaggcggtaagtggagggcaacaataaaggttggcggaaggcaaatacacattggttacttcgcgtcgtttgagtcggcagttgccgcacgaaaagcagcagaaaaacaatatggttttcatgataaccacggagcagagaaaaagaaatgagcttatcgattgagcaacaaatagatctatacgcagacaaaatcccggcaatccaaaagagatttaccgttggaaatatcgttccgtatccatatcaggctgtggcttatattgagacagccaaaagaatagcaaactacaccgcaccgttttacattaaggcttcggtttccgccgggaaaaccatcatgatcgccatgctcgcagcgcagtgcaaggcaatgaacttacccatgatggttcttgctcgccaggccgagatcgtgaagcaggattccgaggagatcagtaacctcgacgttccaaactccgtttattgtgccgggttaggcacgaaggcggcatacttcccgatcgtcgtcggatctgaagggacggtggttaatggcctgtttaaaatgctgggcgactacgtgccttcagttctggctattgacgaatgccaccaggttgactggcaagatctggcggaagcgatcgccaacaatgaatcgttcgagtacatgagccgaccgaaggataagccgtatcgcgtgaacggggaactggtcgatgccgaccacccatacgacgaaaaattcgacgacgtagaattcggcggcggtcgcacgcagtacactatcgtcatttgtgagttaatgcggaggtgccttgagaagacagggcgagaacttcgcatcgttggctatactggttcggagtttcgcggcgtcattccgattttacaggaagacaagagccagcctggtttttggcgcgagcagatcaccgacattaacacaaactatcttgtcgagttcggatcggtggttccgacaatttttggtgatactgaatccgaagggttagggtatgacctatcagaattccacggttccagtcaggacggtacgcaggattttagcgcggaagaattgcgcaagatggaaaagaaaatccatgaatccggcgaaatgacgaagctgattatgcaaaaggtcgtggagcgtgcgaaaacccgaaacggagttctgataacttgcgctggacagcggcattgcaaggaggcggcgagctatctaccgccggacgcaacatacgcgatcatcaccgaaaagacgaactcaaagaaacgcggcgaaattttggataaggcgaatcgcggtgagatcaaatacatcttccaggtgatggccctaaccactggcgttaacgttccattttgggatttttctgtgatattgcgcaagatcgggtcgcttacgttgcttattcagcttttggggcgcggaatgcgacttctgaaggactggcaaaaacagccgccttactcgtgggtgaaagaagatcaccttgtctgggattttgccggaacaatggatgacctgggccagttgtatttcgatccgatcttggagcaggcgcaataccaaagacgcaagagcagcaagaacggcccgaaaatttgcccggtatgcaagggggaaaatagcgagtacgcccgcagatgcattcacaaagacagtaacggcaatcggtgcgaatacttctggatctcgcagaggtgcgaagaccagaaagacccgcgaacagggaagattaaaatcaaggggtgttacgctgaaaatgatattgttgcccgccaatgcagatgctgcggcgttcagcttaaagaccccaatgacaatctcaccgggaagcactatacgcagaatgactggtatgatgttgtctggttcgatatcggcttgactcgcaatcagtccgggatcatcttcaattacgtgttactgaaccatgacggcgagcgattcaccgcaagggaaaagttcttcccggaatcagagaatcagatttgcggcaagctgtggcggcaaaaggcagtcttccagcacgttagcgacgcggtaatgcgtggcaagttgggcggaatgaaaaacgcccgcaagatcctggagtatgcggaatacttccgcgcgccgaagcgcgtaacgcatcgcatcaacggcaagaaggaggacattatttcccgcaaagactttggaggcgaggagtgattacagacaaaggggattacctcgaatattacggcgggcctgtaaaggcttgcccacttgaaaaaatcgaccagatgaacagcgtttcgtggctgcgttacgaataccccgattatctgttctggcatacggttaacgagggtagcaagcacaaggcgagcgccgttgcagatcatcaaatgggattgcttaaaggcgtaagcgatatccttgtgctgattgggctgggcggaaaatacccgttcgccgccattgagctaaagcgccagggtaaatcccaggcatcgccagtgagcaaggagcaacgggaattcctcgccgccgtccgaagccgtggcgggttcgctgccgtggcctatggattcgagcagtttaagatcgcgtttgaagacgcaatcaaatagcactttttgttaaaactacccggcgcgagtcgggtattattctcccatcgaaacgaagaacggagtatttaaaatgaaaaagattattgctttaattgttctatctcttgttctcattggttgtagcgaaaaaccaaaaacatatatttgcggtaatgaatcgtttgaagttactagcgactatattaaggtggttcgcggtaatagcgctggcgttttaattgatggcattggtgaaaaccagtataagctggttacaccacttggaacggctttttatactgttaataaaaacaccattgatattaaagttagcgtttatcagaacactttaacttgcgaggttaagtaataatggcaaaagatatcacagacaaagacactcacgacgcgttcacgactttcgaacagcttgagcgtgaaacgttcataggcaacgcgcttgccactggcggacactatcaggccgtcaagcctgataaattctaccaggtaacgggcaaccgctacgccgggagcaagacgccggatatcgtccgcgacaagtggtcaaccgatcgcagccttattgcttacatggaggagcgttacgggccatacgacctggacgccgccgccgaagaaagcaacaccgtctgccctaagttttacgacgaaaagaccgattgcctcaagcgctggtgggggaaaaataagcacgtatggcttaatccgccttactcgttcccggatccctttgtgctgaaagccattgagcagatggagcatgacaaccagatcgatattttgcttcccggcgacaactctactgcgtggttccgcgacgcacagaaggcagcggctgagatcatttggattgtcgcagacgtcacggaggacgaagacggaacgcaactaagccgatccggtcgcctagccttcatcaacggcctaagcgggaaaccagtcgacaacaacaacaagggtagcgtgattttcatcatgcgcaaactcaagccgggcgaggagcaaaaaacgttctacgtcccggtaagcgaaatctgcccttcattaactaaaaagcgcatgcgcaaacgtgggatctgaaaaatggaacagcttgaatctttcaccgaatacctccacatcgtcgtcactctgctggacaagtacggcttcatcggtacggatgaagaaaagatggccttcgccgatagcatcgatggcacttatcaagaattcatggataacggcacgccgcttgctgactggcccgcgattcttgagcgcgaattgctggattttcgggcgcgtgaaggtgcggaatatttcgcgaaacagcactaattgttaaacaatgcccgccgcgagcgggtattattgttccatcaaccaatcaggagctaacgccatgaacaccaaaaccattgccgacaccatcaagatcgcacaagttaagccgcgcatcgtatctcgccacctgattaacctttctcgcctgtgcatggccgactacgtggcgaagcctttagagaatggccttgatggtgaaatcggtgcgatctacttccgcgccgcgcacggcatcgaagaaattcacatgtacgagcagatggcggaatgcttctgcatttacggtgacgaatgatgattgtagaatctggccgcgctgccgtatggcagcatgccaaagaggctggcattagtgacgatatcgtgatgatcgcaaagtatttcgatatcaaggatatctccattgtgttcaatgggaaatttacctatcttcatgagcgaccactgaagcgaacgcgtatagcggttgcgacgcgggcagaggccgacgcgctgaagatgttcattcacgaatctaagcagaccaaaaaatattacaagtagcgggagtgttgagaatgcgatatattgcgatcctgattacggcggtggttctcactatcgcaatcttcaactacgcaattcaattgggataaattatgcaacctaaaatcacagacgaagaatttttagccgcccgcgaggagggcaagacctaccgcgagatcgccgaagagttcggcatgaacgttcgcagtgttgagcgtcgcggcgttcgacttgcccgccaggggcatttgcacggtaacaatcacgtagcgaagcacatcccggacgggttcggggtcaaaggcacatcgaccatgattcgcgcgaacggtgatgaagttgtgcgctgggtcaagtcagaagtagaccgcgaccgcatgatcgctttgatggaggcggcgcaagcatcattctgcgaagacctacctcgcgctgaaccgcagcctaaggatgaatctaagttttttattgaggatcagctcgccctgtatccgatcttcgatttgcacatcggcgcgatggcccacaagcacgaatgcggcgagaactacgacaccagcacggcggaaagggttcttaaccgcttctttgactactccgtttcggttgccccgcagtcgaaaaagtcggtcttgctggtcggcggtgacttccttcacagtgacggcctggacgcagtaaccccggcaagtggtcacgttctcgatcaggatagccgttacgcgaaacttgtttatgtggctattcgctccttgcgccgagctgtgtcgctactgctgagtaatcacgaagaagtagaggtgcaggtaatcgaggggaaccacgatcaggctggcatgatctggttgcgtgcagcgctcgcagcgttctatgaaaatgagccgcgcgtattcgttgacgtcagccctgcaattatgcatcgtaccgtgtggggcaaaactatgctgggctacactcacggccacacgatgaagaaggcagaaacgcgcctcgccgcaatggctacagacttccgcaaggaatttggtcaatgcgactacatctacacgcattcgggccattggcatcaccagaccgtaacggagcactcgttagggattgacgaagtacacggccagttaggggccaaagacgcttacgccgctcgcggtggttggcgctcatatcgccaggcggcggttattctgtacagcaaagaatatggcgaagtaggccgctttatctaccgcccgaacatgtaaccacaacggccccgcgaggggccaacaaggaaaaccaatgaatagaaatatctgcattttcgatctcgatggcacgttgtccaatggcaaccaccgtttgcacctgctgccgaaaaaagatctccacctaaccgaaagctggacggcgttcaacatggcggctggcggcgacgctcccattacggacacgatccgggtaatggaggccatgcgcgcagcaggatttatcgtcatcatcctgaccgggcgaagtgatgaggcacgcgagatcactgaaaaatggctggtgcaaaatggcgcatcgcattacgacctgctgattatgcgctccgcctccgacaaccggaaagatacggttatcaaagaggaaattttacgcaagattggcattgagcgaatcgttgcagcgtgggatgatagccccactgttattgcgcacttccgtagcctgggtatcacaacttaccaggtctgcgactacggcgaaaaccttcacgaccatctgaaatctcatggagtagacaaatgaaaaatgtaatcatcctcaacggagcgccgggcatcggaaaagacaccatcgcggaaatcatcgcccgcaaatgggagtatcggatcctgagtttcaaatcaccgatgtttgacattgcgcgcgccatcctgggtgcaaccgactttgcccgcttcgccgtccgttaccacgaccgcagccggaaagaagtaaagtgcgactttttaggcgaccgctcgccgcgtgaattcctgattcacattagcgaaaatttcgtaaagccgacgttaggcaaaaagcagttcggcaagttgctttgcgattctgtcgtgaattcgcctgttagttgcgtcgtcagcgacggcggatttgacgaagaagtagagcacatcgcggcgcacgatagcgtaaacgtctttgtcgttcgcctgcatcgtgacggcatgactttcgagggtgatagccgcaagcatattagccgcccggatctgatttgcgaaacttatcacgaattcgattttgatatgacgactggcgagccggaagacgacgcgcaaaaaatccttgatatggttttcgaagggtattaatattctctacgtaatgcctttattatcaccgccttaaactttgggagccttaacaggttcccttttttttgttctttatttggcccaacgcatatatcatcgcattatcacttaactaacagaggttgcatatcatgcgtgaattcatcaacgcggcaaccaatggtagcggcggtgttaccctcgcaggctctgcgaccgggcaacttatcattgcggccattggtttatttttcatgattctattcggctcattcggcgcgtggttgcgctggcgagattcaaaggcgctgcgtgaagcgctggaagccggggatatcaaaacggcggtgaagatcaggagtaaataatatggggattaaaacgcgggttacattcgcagcggcgatggcgatcgctgtcgccttcctcccgaaagtggaggacacgaaatacaaggtttataccgatatcgctggcgtttcgacggtctgcgaaggcatcacagggccggacgtaatcaaggggaaaacctatacccggtcagagtgtgatgcacttttggagaagcacatccaggtcgcaaagcgtgtggttgacagcaaaatcaaagtggccgtgccggacaccttccgggcgtcgatgtacagcttcactttcaacgcgggcggtggcgcatactccggcagcactatgctgaagttgacgaaccaggggcggctatatgaggcgtgcgaacagctttaccgctggacgtactatcgcaacccgaagacgggcaagatggaaaaatcgcgcggcctgcataatcgccgggatcaggaattcaatctttgcattaaggatctaaaatgagtagcttaaattttcagcgagcattggcaatcggcttcatcgtgtgggcggtcgcactggtttccggttgtgcttccagcgtcccgatcctttccgatctggtgggcagcaagccggatatgacggcgcaagtcggtgcggagaacgtgaaacaggcggttggcgtgacgaacaaaacggacacgtccagcaagcaggaaacgaccttcaaagaatcggcagttggcaaggttgacacttccaacaaaaaggcggtgacgacctccagcattcacgcgaaccagattacggcggagaagatcgagatccgaaacgacggtagcggaagtgtgattccgtggctgattggtgcagttggtgccatcatgttcgctgtcggtgttttcggtatgtggcgggaacgaaaaaataaaggggcgtaagccccttttttcatatgtaccgtttgacgtgcagcagcgccacgccatcttcatcattcaacccatgttcaaccttgtttgtcgcggccatgccttgatatagcaaggtgagcgcggcacgcaagtaattttctggtgtgatctgattcacgcaaacaagcctgtgaacctccgttatcagatcttccacctgctttcccgaatagggcttcatcgtcgagttgctcaatgtgcatcatctcccacatgtatttgttttccatcccttcaaacgaccggaagttaaatccaatctccctgttatccgggccagtgcaccacaccacgccgttttttccgtccaggtatccattcgtatagcttcgcgctaaaaactccttagaaaccattgaggcgaacatacggtgtgacacgttggcagcttttgccatgcgtggcgattcgcggtgcatgtaaacgaacttcgcaaaatcttgccgggtaaattcccggcgagactcgcagaatcggtaaatgtcaaggataaacattcattacctcatgaacgaaggattaacgaacacttccgaatcaatcacgcagacgaaacctaattcctccatcttcggcagcaatttttccttaatccttttactcaccccggactgacctttgaagatcttcagattgcggcacgcgttatagatgctctgaacagtcatcacgcctttcgactgcttgcaacggctggcgataacatcgtacacggccttaatctccgcaccctcaccagcgaagccggacgaatcagccgacgacaaatacgttttgctcaactcatgaaacatgatgatggcttcgtcgatcgtttcggttccgatcttcttcgagcgcttgccgccaggttgccagttgcggatagtgtggattaccgacgccaggcgcatcacctgcttatcgaatttacccatcgcaccgcgcagcatcgtatgcgaatacttcccgccgtcgcctaattccggctctaactcctggcgggccttgttcagccgacgcatgcctgcttcagtcacttccagcttgatatacgattcagtcataatgtcatgaatgaggcggaagtaatcagcgcgtaaagacttgtcgatcggctcataggtcgaattccctttttcgtcaatgaacacacgctcacctaaccgcgtttgctcgcgaaccaaaaggaaacgctctgatacaccgataccgcgagaaccagcttgcatgatggcgtcgatggtttcatcctgggcgattacgcaaatacagcccagcgcgacgaatgacatattgttactgacgtcggaacgtgcgatcgatacgtggcccttatcccacgccttcaacaccagttcgctgttcgtcttcttgccgccgtcgttgccatacgtgatccctaacaggctgttaaccgccgtcgcttcgtccgagataaccgcaaagttgccttgccgattgttgattttcgccaggccttccggcgtggtatcggagacggggaaggtcagatcgcacatgctttctaacttctcctcaagttcgtctttgtcttcgaacagtttcgccatatcagactgcgataactcgcctttcatggcctgcttgttggcggacaacttcgccatgattttcttgcgctctttcttgcgcgcctcgttgattcgctcaacctctgcgacgatcggatcgatagccagcgagttaatcgcagacttaccagcggaaggcggctgcgacgtaatgacgtaaagcgtcgtcggttgctcgctgccgtggtactccacccaaaagcgacccatcatcgcggcggacacggttcctaggaaatgcatataagccgatgattccgggaattgaacggagcgagcggcattgagcgccagcttgccgacgatatcgtaatcattcgcgatcgagatcgtgggatacttgtccgcgtttacgtcgatatctttcggcttgggccagaaagaaacggagtcgcgatacccgttcgcacggatggcgacgcgcaaggggctgatgccttccttctctgcgatggcaataatatcttgtggggacacgcggtcatttaaaaacatgccttgctcctgattggttaatcgtgcggctaatgataagccgtcttaaatccgagatccagtgataatctaaacgcacttgcaaaatgtgcttaggttatcggggcgcatggccccgaatccgttacaggtatttcgcctcaaacgtggtgccgtccgacacgctgaaaccgacttcctcacggtagagcgtccagcggcaaccgtcacggtcgaagatgtatccggcgactccgcccagcgcacgaccgctttccacctggtaacgcttgccgacggtgaaggattttttcaccgggtttttgtggtcgaggccaacgcatttcagggttttcgttttcagctcgataaacgtcgccaccaccacgccgccgacgccagcaataaacaactcaccgctaatgccgaccgacaagcaaactcgcttcttcttcagttcggcactgttatataccatcattgacacgttgccttcgtcgtcaatgcgagcggaataaaggttgttttcctggatattaacagcactgcttgaggtgcatttaattttgattgactttgccattttatttcctgtctcccatttcgatatagaggtttaccagatccagaaagtcggatttgtttctgcaactcaatttaaagccaacgtgcgattcgatcttattttgcatcgctgccatcgttgcgccgccgttattcattttcaaaacttcgcggcatacatcggccagttttttagatatcatatttcaccaccgtaattttcgtgtttttgcaagcgtcttcgatatcgctgattaagcgcttcacccggatatcaatcattgttttgtggtgcatgacgtcaacaatcccgcaaacgcacaagatcatgattgcaaagaggaagccgcctgggcaagtcattgataatgcagttgctaacagcgcgataattaatttcattttgtttgcctcgttttgtttcgatggagtaactatacccgcaattaagcgggtacgtttagcaattcgtgctattcattaaaattagcctggaacacggcgcgagcgaatccgcgcggagtgatagaacgaagcatctttgttctttcagacttgccgccaaggaatttccacgcccaaaagaaatcgacgccttccacgccttcaggcggcaataaccgctttggctccacgaatccgttaccgtgccagatgcacgttttcttcgtgtaattgtcgcagtgcggcatttttgggtgccaaacttcctcatgcggcgcaacataccctccgaagtcgcgagggtggaaataaaaatccggcttgcgccaaagagtcgacaatttgccaaccgggttttctaccatccagggacaattatattggtcgcccaattgctcgatcatcttcgcatcatcggcggctgatagcacatcctgagtctgccgggcgtgcttcaccccgctatgcgctaacagcgtgcaggacgggaaagcgaaaataatgtcaggatccgggatgcccaggatcgtgcgcttcacgtcgaaatctttgtcaatccacatgttgacatactggattttggcatgctccatgcggattttgtactcgccgtggtcgccggaatcggcattgaagcaatacacatcgcaaccgcgaattgcccacggtagacccataatcccggaaccgtcaaacatgcaccacacaacgcgctttttcatcgtcacctcaccagaaagggatacattcgcggcaaccttcttcaccagtgcagccgcaactattttcttcttgctctgccagatcgtcacgcatcggcagactttcggcatccatatccatactgcccagggcatccgatagcgtcatttcctgattggctactttgatgcaatattcgcggttaagccctgcgtcctgggcggttaagaaacggtgccagtaggcatcgtcgtaattatcagccatttcttttcctccggttaaattctcgcaaactggcggcgcatgacttcgaacaggttttaccccagccacgtttaagatccgccgcctttaccttatagacggccccgcatcctggagcctcgcagcacttcatactttccttcgccccgatgtgatccggtcgaccagtcagggagctatcgccgggattcttcgtcgaccagaaaagttgcactgtcgcgacctcctcgccgaactcattaacgaacatgtaaacgcccttgcttttcagaagcacggtgcaatgatgcatttcgccgttgacttccaggtatgcgcgatcgccttctttcattagcttctccacgattcaatgaacatgctgttcgattccagcgtcagcgtgacgccagccagggaggacggaatcaggcgagcgcccggaaccgttccgacaacatagcgaccattcgatttggtaatcgtgatctgagtaaagccggattcgcggttcatgcggagaacgacgcggccatgtgcgttcagtacggcgagaatggaatcagtcttcggatggttcattgtgtaactccttcgtttgttggtgtggggacagtatgccactatccccaaattctgttttagcaattcgtgctattcgggaacgcaggtcgtgtaatcctggcagatgtagattgtgcgctgaacacgctgcgcggcatcctccaggctctgaatctcgatatcgttgctgtcgacccggcagggtgttgcaccgaagatgaaataccccgtctgcttgtcgttgatttgccacgccttgctttcgggaaccgtattgacgacaaacggcgtgtcgtcggctttgaagtcttcagggtgacgcccgtaatagtggatgattgcagcagttgccgccgccttaaacttttccgtcacgtcacgggcggcgatatcacgcgagatctggatatcaacatccggcgcgccgaccatgtaggtaaagctgttcgaaatggtaactgttctcatttatattttaacctcgtttcggtggatgaagtcggcgacatagtggcactcgatcgggttttcgatcccggcgagaacctcacagcgcccgttgttcagtaactggcaatgctggcaatcagacccgccaacattagctatgacgatggcgatcccgttgcatgaaccgccaaacattctgtgcgggaaggggtaagcctcgcaggtgcaaaccacctccccggccctccgctttctcatgcgctccccttctcgatgcagaagacccaatcgcgagcatcaaccgcgaagcgtgccacgccgtcgagcacgatgaaaacggtctgcccgttaacgccgcgacccttctcaatatcggtgacggtgcggaacaggtcgcttgcgccatattgaattttgtccccgattacgacgtcgccaaatgctttcatggttgatctcctgactggtttcgatgggttaactataccaggccttgcggcccggcgtttagcaattcgtgcttatttcactgctttcttcgctgccttgtacgcctctttgaaggccggaacatcttcgaccggaatccagaagccggatccataaccatcgtcatagcaagggcattggtcgcagtagtcgccccaggttttctcttcgccgccgacagagaatccagtggccattttgcataacgcttcctcaaccgcttcgatcttgtcggcgtcgctatccatgataacgaagttccacttgccgttatactcgctgcccaggttgattgattcgcgttgaagtttcatagctttagctcctttggctcaattcgtttcgttgaagtaatcatagcaaagtcgatcggatggcttttaacaaaaaatgctattcctgcgattgctgattattccaccgattcggaatagtggaatagatggtgattgcatttgattcactggtgattacttttgacgaatcatgattgcttgtgattgtttcattctgtgcaattacttggggaagtgtttcatgatttgcaacgaattgcataaatgtatgcaccatgcacgcaatttgccgatcgaagctggcaaaacgtcgagttgtgtttcgccaacatttacgtcgtgtgggagtgtgggggcggaatcatcttacctaaaaattgcgcaaaaaatgaccaatataagcccatatatagatagtaagtatatgataaataataatattattattattactctttatctttatatatgtttggtaagatttctccggggaggttatggattcctcttgcgcaagccataatttttagatgttccgccgcgaaaaaatgtatatagggatatataggggatgacagcaaatcttaccaaacacgccgaaaccctttgacggcaaggcctgcggcctgtattatcaccttccgaaacattaccaaacgccgtaaatgtgggggaaacacaaatgcaatacaaaggctatgagttcgaagaagtcgacgtgtccgagtggatgcggtacgacgcagaaaagcaagccgcttaccatgaatggctgcaatccataacgtttggcgacgccaccaggccagccggacggagccaggaagcagcgaagccggaaggcacattcactggtaatcgttcgtccgagatccggcgcatgttcctggatggcgggcggcgtatccagatgacggcggaggagttcgtggagaagttcggcgttaatccggtcgacaaccatttccgcaggccgttgctgaaactcctggagccgggcgaggtgttgcgggtgagcctgggggcggggttaatctccgtctttaccgagttcgacgcaatgactggctcacacctggaagccgaggcatacaggcggcagggcgctatctctgagcgggaaagaatacttgccatcattgacgaagtgatgccaggaggcatcatgctaaaaggctataagctggcactaatcgcaaaaatcacaggagcacgataatgaaactatatccagaccaaaacgacccggcggcaccgatgcacctgggcgacacgccaatcgacgagcaggaggttatcgcagccattgccagggcatcggacgacgaaaatccaaccgccatggaatgcgtgacagccgacctgctgttaatgtcatttcttccgggatctgaatcttacattcagcacatcaccgagacgggccaggcagtgacgaagccggaattcatcggagcgtctaacgtcctggcgatgatggccgatgaggccgacaacatcattagcctggattatccacaatgagcgcctttatcctgttttccatcggtgttaattgcggattgctcctggcggcatttatcatccacctgagcaacaagtagcactttttgttaaaacccggtcagagcgatcgggtattatctcttcatcgacaacgaaccgaggaaagcgaaatgattactctgatcacctgggaacacgaaaacagcaagccagaagtgcgcgagttcgagaccgtggcggcgtgctacaacttggcggcaaacggtggcttttacaaggcgcagatcgttaacgagttcggggttgttgattatgaattttaaggcgagcgacgtaaaacctggtgtagtctacggatcgcgcctcaataaccgcctttggcgctgggacggcgaaactatgtggactaaaggcgagggcgatgttatatggcatgaatgcggctggcctcatcccacaatgagccgcctggatatcgcttattatctttcggtcggcgatatgcacgaggtcgaagatagcactttttgttaaaactgccgtaacgtcatttgataaagtggcgttactgaagtgaacaatccaatcaggagcaacgcaatgaacgataatttaatcgcactgctggaagaactgaattcctacggctgcgcatacatcgagctttcgagcgagcaggttattgaagtcgcaatcgacgatgacgccgggtttaccagattaagggtggcggcaggggccgaagaggaattcgaagactgcggcatccgtgaagtaacaaaccttctcgaataccaccaggtgaaggagatccgctaatgaacaccgtcaaacttatggttgtcaatgcggcccgcgagcgtgagcgccaccttatcggctgcgtattcgatgccgtcgaggtgcacgaaccgctaggcacagtgcacgtaatccagggcggatacctgaacgaattcatcgtcaacccgctggacaccgacgaagatttgaccatccgtgttggtagcgagccggaaaacgcgcttttccacctgcggaaagtatcgaaggcgtcgcagcgcaagttgctggttcgcgcactgaagcgcattgcgaaggagcgcggttacaccgacgcatacatccgcaagttcggcacgttcgctggcgtaggcgattgggcgcggtcatgggccgacttttatttcaacaaatccggcgaattctgttccgtgcatacggactggctgcatggcacagaacacgatcccgtaaacggccacgagtggtacgaattcattgaggcggaattagacgccctttgatagcacgaattgctaaaacgaaagtccggggatggtgcatactatccccacactaacgaacaaaggaaattacccatgaacagcatgaaaattaacctgatcccgtccgacaacttcaccaaagacgacgacccgctgttagccgccgttattcgcgccgggatcggctgggcgcttagtgatgcctcgtgcgaatcatttatgcgtgaaccgttctcacgaatcgcggagcttgaaaagcaggttgctttcctgactggtgaacttcaggcggctatcgccacgatcgagaaggttcgggaaatcatgcgcaccgaacctggctatgacgttgaagatcacgcgcgagttttgcgcatgatggccgacgctttcgcaaagctccagcaatagcacgaaccacaaacacgaatcgtggttgctacatgtcaaccccatcaaagataaggaaaaacatcatgatttacgcaattattgccctggtggttcttattatggccctgtatgcgtgcggctgcttcctcatgcgggccttcctgaaatctgcggattctaccgacaaagaagatctttatcctgtgctttgctggccctggattacactttccgccgttggcagcgtgatcatttcccgcaattttaagtggtgaggcgatacatgaacatcaaaatgtggttcaacggatttacctacaacgtgcgctttcgcgggaagttctattactggtgtgatgagggcggcaagcgctggcggattcgcccacaccagaaaggcgcgagttatgagttaggcattgccgaggcgcaggggcgcgtcgagtgggttaagctgaaagtcatggatggcctgccaaatagcacgaattgctaaaaccgatcaggggtaagctggtatagttaccccatcgaaacgaaacggagttacagcaatgaaaatcaaaataaccaaaatcaacactcttaatggcgacggctcaattaccctggaagaatgcggcctcaaaatcggcgaagttcttgaggtcgacggccacttcaacgacggctcctactgtgtgattgctccgcgcaatagcgagtttatccaggctggtgacaatatcagcgtgagcgaagatgaatgcgaggttgtggaagaatgagcaacaaaatttgggttctaacctacaccattggaaccaacgaggggcgcaaatcgcgccgcctcatctgcgacaccaaagagcgggcgattaggcagcaaaccgttcttggtggcgaggttgtcgagtatctccgcaagcctgaagcgttcaaggtgaactggccggaaggcatggatatcaacggcgctttagcgagcctgcgtgagatgcagcacaacccgaagacgtggagcgaccttcaatgcctgcgggcagagccggaagtgaaggccgacccgttcaccaatattcgggcgcagcacgcggaatggtcggatcgccagttcggtaacgttgggccagttgggccgctcaagcacctggcgaaagaggcgatcgaggccgccgaagcgccggatgacattagcgagttcgccgatatcatcatgttggtatgggacgcaacgcgccgcgccggattcagtgatgagcagttggctgaagcggtggcggaaaagctggaacggaacaagcgtcgggcgtggggcgaggtcaaagatggcgagccttgccaccacgtgaaaaattaacgaaatcgaataccgtttaaagcgcctgtaagccattctggcgggcgcaaatttaaggagtgcgattgtatgcctgaatactcaaaagtcgaagatatgccgattggcgcaacgattacgggtatccgtatgagtgagtcggtcgacacaatcgagccgctggcgttcccggttacgcaggtggagacggacagcagaaaagggttcatcttcatctacaaaaatttcaatagtccgctgcgtgttgaagtgttcattgctcgcggaacctgggtagaatgggagaaggacaaatgttcggactgaatgaagcgcagtacaacgctgtgaagcgcatagcaaagcagatggccgcagaaacaaaagacgccatcaagaaggacaagaagacctacgatcaggtcgccgcgaagatgatcgataaacattgggcgcaaatcaacacgctggttactcgcggccagtttatctggatagctggctacctggaaggccgattcggtcgcagggatggcgagtatgaataaaaaacaggcaaacgaatcagcgacctattgacgtcctcgcgctgaccgggtaacttgaaccacgtagacacaagaggcggtaaacatccgcaagtctggccccgctttggggcatttacaaaaggggttgtgatgcagtacaagatcatgctcacagcaagaaaaatgggcggcttttgcaagtcctgcattcaagagtttagcatgacgattgaggcgaacgacaccgccgacgcggtggagaaagcaaaaaagcaatccggcgttaatctggatacgcataaaatcaacataaactacataagggaagtcaatcaatgttaactctgattattgcactgttaatgctgttcataggctatcatgttggcgcggctcatcttgtcgagcgcctttctaagcgggtacatgaaggcacgtttgctgccatgatgtacaataagaaaactgcacgttgggaaaaaattggcgatccggatggtatcgcaaagcgcataacgttttcgccgcttccgtatgttgactgcgagcctttcgtgaaactacagaagacgcttaatcggcgaaacaaactgatatgatacaacgacccgcttcggcgggtttttttatgcctgcaatctggtatactcgcaactcaacaaagaaggagggctaaaa

SEQ ID NO: 236 - DNA, 50073 bp, synthetic construct; identical to SEQ ID NO: 3
  source 1..50073: mol_type = other DNA

SEQ ID NO: 237 - DNA, 49453 bp, synthetic construct
  source 1..49453: mol_type = other DNA
atgtctgaagaacgtagaaagcgcgtaacgaaatcgcactttgagggaaacttcaaagcgctatatgaaaaggaatttggcgtcgtgctggggcgcacggcagaaatgacgccagaacaattttttgatatcgcaaagcgttacttccagtgggccgaagagaacgcaatcaaggcggcggaaacggcaacattccagggcgacgttaacgagtggggagtgaacaagcctcgcattttcacgatcacagggttaagcctgttttgcggcgtgaaccagtcaacgcttgggcgctatcgccacgacccgaactatgcgccagttatggagtttatcgactccgtaatctatgagcaaaaattccagcttgctgccgtcggcatgattaacgcttctttcgtcggtaaagagatggggatcgataagccgccagtgctgaacatcgacgctatcgccggggataagaacgagatcaccgaagagaaattagagaaagccgtgaccaatattcttgataagctgtaagggtaggctatgaacgaaatgatcatttgggaagacctgtcgccagccgataagctggcaattaaggcactgagtacgcgaaacttttcgctattcctgaaaatctggttccagatcattcagggcgaaaagctaatgtggaactggcatcactcctacttttgccacacggttgatgaaattatcgccgggaagcgcaagagcacgatcgttaacgttgcgccaggctccacaaagacggaggtgttttcaatccacctcgcgccgtatgcgtatctcaagtgccggaaggttcgaaaccttcagatctcgcagggtgacgccctgtcaaaaggcaactcggatcgcgtgattaagatcttctcatcaagcgagtggcaggagctatggccatcaaagttcgggcgcaagcagatcgatgaatttcaggtcatggacgataacgaccgcgtaaggcttgaaatggtctcccgttcgtccggcggccaaatcgtcggtaagcgtggcgggtacatgacgccgggattcagcggccttatcgcgctggatgatatcgacaaacccgatgacatgttctcgaaggtgaagcgtgagaaaaaccacgtactactgaaaaacaccattcgatcccgtcgagcgaagaagaagaagggcgacgaaacgccaatcctttccgtgcagcagcgattgcacgcgcaggatgccacctggttcatgatgagcggagggatggccatcgacttcgatcgcattgttattccggcgatggttacgcgggaatatggcgaatcgcttcctgactggttgcgtcctgagttcgaacgcgacgtgctttccggcccgtcggtggttattgacggcgtagaatactggtcattttgggaggacaacgaatcgatcgagaaccttgttgccttgcgcgaggccgatctttatacgttcctttcgcagtatcagcaggagccaatcgccctgggtggcaacgtgttcaagtcggagtggtggcgctattacggcgattccgacaaggcgcacgagccacgcccggacaagttcgaatatacgttcatcacggcggacaccgcgcagaaggtcaaggagctaaacgactactctgtaatgtgctattggggcaagtatcgggatcgcgtctacttcattgacggaattcgcggcaagtgggaagcgccagatctccgcgttcaggccgaagcattcatcaagcagtgctggcgtcggaacaaggagtgtgggaaccttcgccggatctacatcgaagacaaggcgagcggtacaggtctaatccaggatttaacaaaggcggtaaacggcatgggcgagatcgtcccggtgcagcgcgataaagataaggtcactcgcgctatggatgcacaaccaatcatcaagggggggcgtgtcgtgctgccggacaatcacccattcgttgcagagcttgaggcggagatgagcgcgtttacatatgacgattctcatccacacgatgatatttgcgacaacgtgtttgacgccgcaaacctggaaatgaacctgagcgacgatccggtagagcgaatgaaacgccttgcgggattgaaaaagctgggtcgctaatacataatgtgggcctgacggcccacacttaaacaaggttgaaatatgaataacattaagatggacgactataatcaaatctttaatggtggcgctggttatgcgtcaaccctcgcgtctatcgcggcaagatttggaacaatgtcgcaggttgaagagttctatcatgaaaacggcatggcgaagaaaatcgttgacgtgatcccggaagagatggtggctcccggcttccagctaaacggcatttcagataacaccaagtttcaatcagaatgggacgggttaaatctggagccgcaaatcaccgatgccctttgctgggcgcggctgtatggtggctcctacgtcctggcgatggttaacgatggtcgcgcattgacttcagcagcgaagcggggtaagccgctcgaatcgatcgttgtttacgaccacgattccgtttccgtcgcagaggaggaaaccagcccgcgaagcccacgattcggaaagcctaaaatgtacgaggtgaagccgctaaacggcgggcaaccgttcaaggtgcactatacccgtatgcactacatcgacggcgagcgagtaaccaacaaggtgcgcaagctaaataatggcgctggcggttcggtgctgaacaagtcaatcattgaagctattcttgactacgactattcggaatatctggcaacgcagctactgaagcgcaagcagcagggcgtttggaaggcgaaaggcctggcgctaatctgcgacgacaaagaaggcgagtacgccgcccgtttgcgcatggcgcaggttgacgctaattcaggcgtcggcaacacgatcggcattgatgctgacgacgaagaatacaccgtgattaactctgatatttcaggcatcccggaattcttgtccgctaaaatggatcggattgtcgccctgtcaggcattcacgagatcgtgctaaaaaacaaaaacactggtggcgtaagcgcaagccagaacacggcgctacagacgttctacaaactggttgaccgcaagcgcaatgacgattacaagccgctgttagaattcctgttacagttcatcgtaacggaggaggaatacagcgtcgagttcgaaccgttgtcgctgcctaccgatgcggagaaagcggatatcttccagaagaacgccaacgcggctcgcggcctcgttaccgaccaggttattgacgccaacgaagcgcgtgatactctgtcggcgttaattcctgaactgaagctaaaaggcaacgctccgaagcagaaaaaacttccggatcgcgccgctggttcaggcagcacgcaaagcgcagagatcttaaacaacacggaggcggatgatgaaagttaacggcagaatcccaaactggcgttatcctgaagcaagcgagcgggatttatcccgctccatgcaggacgcggtgacagaactcgtggtagaaatgcgggatcgcttagaccgcctgaaatttgacgccacggcggaggagatcagccaggcagaagacgatatcagcgaatcggccatcgtgttcttttccgccgtaattgcggcgctttcctccattgggttgactatctatagattcaattctaaacagtggcttgcaattgcgattgcggctggcgggcggaacaacgaatcagttatgcgccttaaagaattcggcgctggcgggtatgaagactggtatcaagattcgttgaggaagtgggaagataccgccgaagcgtcgatcaggaagttagcaagcgatatcgttgctgactggacgacgaaagttagaaccgccaacaacattggcaagtctcgccagcagatcgatgaaatcatcgaagggcgctacgcgatttatggtagctggtcgcgcaaccgggcaagcggaatcatcggaacttttaacagtatgttgatgatgcagcgcctaaaagatgctaaagtgtcgcattacttttggttcggcatgatggatgaccgcgagcgcgaaagccatatcaagctagaaggtaagcgacgccctgttaatggtgatggcattttccccggcgaggagtacggttgccgttgctgggcggttccgtcatttgataatgaggatgattgatggttaactttaatgattactttaatcacgtaggaaaggatctgatatggaagcgagcaacatcaaaccgagtaaaagttggtgatgttgccgggtggaaagatgagcatgggtatgtatacattagattcatgggcaaactgcgacaagctcaccggatcatttgggaaatgcaccacggcacaatacccgaaggaatggaaatcgatcatattaaccatgtaacggacgataacaggatcgagaatttaaggcttgtaaccagaaaggaaaactgtaaaaacgtatcaatgagcgtaacaaacaagagtggagttgtcggcgtgagttggtgcaagagaacaggtaaatggtttgcatccataagggttgataaaaaagagcgattcttaggtagatacgaagacaaaaacgaagccatttcagcaagagaggcggcagaggtaaaatacaatttccataaaaatcacggagataaaaaatgaaaagagttcaaaggttcgacacggtaaagatgaaggcccgatttgatgagaatggctttctggttgacactccgattgtggcgcgtatcggtgcgcaaacgtaccagacgccaaccgggccgcgagtcgagttccgcccgcgttctgaggtgtttgatgctgaatcgctggcttcataccagggaaagccgatcactttgggtcacaagatggttaacgcgcagaatgcgaaaggcctggttgttggctcgtgttccggcgctggcaaagaagaagggatcggggttctcgttccggtaatgatttacgacggcgaggcaatcgagcaagcgaagaagcgcgttgccgctgaattgtcggttggttacacttcggcagatatcgatcgtaagggttggggaaacaacgccactggcgaatatcacttcgatgatgaactaccggaaaacttcgaagagatgaaaaatgattccgtctctgattgggttcgctttgatgcggtgcaaacgaagattcgcgtgaatcacgtcgcgcttgttttccgtgggcgagcagggattgcgaaattaaatcttgatagcgaacaagaattcccctatgatgacgactcaaaccacaaaggagctaaaacaatgatcattaaaattgacggcgtagatgttgaagtggccgataacgtaggcgcttacattgccaaactagacgcgcaagttgcatcggcaaccagtcaggtaacgagcatcaccgcagagcgcgacgcacttcaaaccaaagttgatggcattgaagatgaagttgccgcccgcgttgctaaaatcaaagccgacgaagacgcaaaacagaaagttatcgcagttgtttctgccgctggcgtcaagtgtgacggcctggatgttaaggcaatgaaagttgcttacatcaaagaggtagacggtcgtgatctgtctgacaaagaagattcgtacatcgacgcttcttttgactttatcgccaactctgataagatggctggcaatcgctccaaagtcttcggcaaaaaagaagatggcgagcaaaaagacaaaggcggcttaccgaaacttgacggcaccgaaatcatcgatccgcaggcaaaattccgccgctaataatttgcggccttcgggccgctaccagaccaaataaacaggagattcaaaatggcacagattccagcttcttattcccgcaagcgtgatattgctgtagcggggcagatcgctgatacgtcactttacaatatcgacggaacttgtgttgctgaaggcgatatcaaagctggcgtactggtggcttccactggcgcagtttccaatggccacaaggtagttaaaccagcaaccgcagcgagcgacgtcattgtaggcatctcgcagttctcgcaagcctactcgcctgaaggcaagtatgacgatgagagcgcagttaacgttatgactcatggccgcatttgggcgatcgctgacgcaactgttactgaagaagattgcgcgttcggttctttcgtcacctttaccgcaaacggcacagtagcgaagggtgatgccggggttatcaaaactggctacaaacacactggcgaatacaccaaaaacgcagatggcactgttctggtgaaagtgcaggtgctttagggcgctgtagctccagcggctacaactggcgacgctggcgtataaaataaggggcttcggccccatttttgcaccagaaaaaaacctttgacggcttaacgattcgtgatattcttcatctcgttaagctaaatacacaaacaggagttttcagatgactatgaaattagatgcattcgaacagagtgccattaaggtcgcaatgcagggcatgggcattgatgccgcaaaactggatgcttacggtatctggactgttaagcagatgactcaattactgaatcgccagtatgagcaggcatacccgcagaccagcgcacttgagcttttcccggtaactaccgagatctcgccgaccgcccgccgctttgagtggctcgaattcgatggcgtaacttctgcgaaaattatcgccgattacaccgacgacctgccgaccgttgaagcgatggcgaaagagaagtcagggaaagttttccgcctgggtaacgcgtggtttatttccatcgacgaaattaaaactggcgcggcgctgggttccagcctgagcgatcgcaaggcaactctggcccgcgaaggtcatgagacgctcgttaatgatctggtgttcaaaggatccgctcctcacggcatcgttagcgttttcgaccatccgaacattaaccgcatgaccgccagcgcggcttggggcgatgacgcagcagcggctgaaaaggcattcgaagatctggaagacctgctaaacatgatcgaagaaactacgctgggccgccatcacgcgaccaacatcgtgattcctccgtctaagcgtcgtcttctgacgaaaaagatgcctgacactagcggcgactcttatctgacctggttcaccaagaaccacccgaacatcaccattacggcgatggcggagctggaagatattgacggcgcaggcaccaaaggcgtgctggcatacgaaaaagacccaatgaacatgagcatcgagatccctgagcggttcaacatgctgccgatgcagccgaaagacctgcatttcaaagttccgtgcacctccaaatgcactggtctcatcgtgtaccgcccgctgactattgcgattctcaccgggatttaatcaaaagcgccttcgggcgcttttttattgcattgcattctgcaatgtgctttaatttgaaacctaaagtaaaccaatggagcattaacaatggccagtaaaaaagaaaccgtagaaaccgtagaaaccgtcgaaaccgtagaaaccaccagtgccgaacaggcgtcgcaggttgttcaactacaaaacgttggtgcatgtgcaattcgctataaaggcaaaaattacgtctatgagcaggtttttgaagtgccggaaaacgaaatcgaccgattccgccacgaaatcttcaaaggccgggtcgaattctacgacaatccgaaacgcacgcgcgaatacatcgcagcggtgaaggcgaaagcgaaagagatcgtgcagcctaaaagcgcggaataacaaaaactaacaaagggcgcttcggcgtcctttttcatatcaggagagcgaccatgaattacacaattcaagatgtgatcgataaaatgcgcagccttgcacctccgcttaaagaagttccagatgaactgctgtctgcgtgggttgtgcttgccgaagagttcgtttgcaaatccaggttcggggattccatcgttacggcgatcgcattgatgaccatgcacctaatgtttttggatggagcgatgaagcaggaaggcgaaagcctggaatcttacacgcagcgagtggcatcgttcaccctgaccggggagttttcccaaaccttcgatcgcgtatcggcgtcaagcgacaacgaaatgctttctacgccgtggggcaaaatgtactggcgtatgctcaaaatgcgaggcggtggcttcggcctccttaccgccgggaacgtgcgccgctgcggaattggtaggtgatcgctatgaactacaaacaaatccaggcacgcgcaagcgcgggcattaagtttttcagtgacgctgacggcgtattcaacaagtacacgaaaggcgctggcggcggaatcgatccggaaaccggggaagatatcattcctggcgaggtggtaacgacaatcaagggcgcgatcagggatgtaaattaccgtgacattaacggcgaaaccatcctcgctggcgataagcgcgggtttttcactcatgatgtgccaatcatggagggtgacgaaatcgaagtagacggcgagcgctaccgcgtggttaatgcccgtccggtaaaaccaacgggaaccgttgttgcttaccgtccagttttgcgcagggtggcgacttatggctaattacacgatccgggagttcacaggggcaattgatgcatggtgtaaggccgctggtgatgcgctggaggacgttgtaaggtttacgtgtgaagatattcaccgcgacctcgtaatgcgttctccggtggatacagggcgcttccgtggtaactggcaaatcacctttaaccgcgccccgctttacgcgattaacgcatatgaccaaactggcgaaaagacaatccagaacggcaaagccaacattgcactatacgcaaaaggggctgggatcacttcgatctggttcagtaacatgctaatctatgcgaacgcgctggaatacggccattcaaagcaggctcccaatggtgttatgggagttgttgcgatccggttgggcgtttatgttactgaggcaatcaagcgagcgagggcgaaaaatgcattatgagatggcgttaaaatgcaaggcggcagtggctaaatttgccgccgagaacgggttaatggtcgcaggagataacgttgactttaagccaccaaaacacggtgaaacttatctcaagttctcctacgtagaagcggattccagatctgtcagcctttccagaacttgccgcgtttatctggctatggtgcagattgacgttgttttcaaacccgggatcggaaccgacgccgcgcggctaatcgcgcaaaacgttgcaaaatccttccccgaaggcaaggttgttgattctgaaagtaagttatatgtgagcgagtgggcggaagtgtaccgcgttcagaaacacgaaacaggctggctcctacccgttcgcttcacagtaagatgcgaaagcgcggaggagagcggttatccatcaacatgactggtcttagaggtgcttataatttcttgccagcctgtaaatatataggcataatggcgttgttaaactttcatcaaaacaggagtattcaacatgcatttaccaaacggtgcaaaggtcttctttgagaaggctcgcggtgcggccattccgtttaccgcaatgaccaacgacgcgaaaaacccaaaaatcacagtggcggacggcaagctgaaggtgaaagatattgtgatcttcaccgattgcacctggggcgacttcgttaacaaggtggctcgcgtaaaagcagtgacagcaggtgtggcaacgctggaagagttcgatacctccgacactaacaagtatccgggcggcgcggccactggtaacgtgagcgtgatcactgattgggtcgaattgccttgcattcaggatttaggcaaagacggcaacgaacagcagttctataactatcagtgccttggcgatgagcgcgagcaatcagaacctacttacaagtcggcggtgacgcttaactacacgtttgcgcacgattacagtaacgcgatctaccctgtgttgcgttcagccgacgccagcaagcaggcgagagcgatgtacatgtatatcccgcgagcttccgaggttcgttactggtctggaattgcatctttcgatgacattccttccacggctgttaacgagatggaaacggtaacgcttaacattgcgcttaaaggtgctcacgtcttccttccggttgtcgtgtaattaaatggcggggcttgtgcctcgcctttttttgtgcataatagcgaataacacaaaccaatcaggagttaacaaaatggctaaattcaaaattcaaattggcggcaacctcccttctttcaaactgcccgtaaccttcacttgcccggatggcaaagaagcgaccatcaccatgaccgtaaaacatcgctccaccgatgagatgaaagacttttatgagagcgaagataaagcgccaaagggtaacgccgagtttatccgctttatggccgaaggctgggatcttgatgatgagttcaacgacgaaaacatttcctggctttgcgctcacttcccggcgttcgtcatggcactgccacaaacttacatggccgcgcttgcgggccaccgtgcaaaagtttaaggcgggctgtttatctcacgcttcagcctgagctaaccgatcgccagcttgccgagtacgggttaaggcgatcggattatgaggcagatcttgaaacgatctactttgatgaacagaccgcccaaagctggcagctattccaggccatgcaaacgcagtggcgcattgggatgaacggcccaacggggcttgactataatacattgcctatgttcttcgaattgtataaaatcgacaatcgagaagcggcattacttgacttgcaaatccttgagggtgaatatctgaaggagatttacaagaaatcaaaataagcgcctacgggcgcttttttcatatgggggctaaacatggctgataaagtagctgggttgacgtttggcgttgacgtttcgcaggttgataaagcggtacgatcactagcagaactgaaaaaccaaagccagcaaacaggcgctggcctacagtcacttgcggacgctgaaaggcgggccacggcgcagaccgaggaaatgaaccgcgcgttgcagcgccagaagcaagagactgacaaatcaaaaaccagctttagcaggatcgcaagcgccatcgatccaacgatcgcaaaaatggccaacttgcgcaaagcgacggaagaacttgataaagcgtgggcgctgggtcttgttccggacaaggaatttttccgccttggcgctatcatcgagtctaccaccaaccaactccggcggcagcaggcggcgctaaccgaagaaggtcgcgcagcaatcgcagaggcggaggcaaagcagaaggcggcaaacgccgggcgtgattttgtcgccagtctgaaacagcaggctgactccatcgggaaaacacgcgccgaactgctggaaatgaaggcggcgcaattgggtgtatctgcggaagcggccccgttcattaatgccctgaagcagcaagagcaggcgttaaagaaacagcagaatgcgatgggcctggctggcatttctgccgggcaatataaaatggccatgcgccagttaccgatgcagatcacggatattgtaacttcccttgcgtcaggtatgccaatctggctggttgcggtgcagcagggcgggcaaatcaaggacagcttcggcggcttgagcaatacgtttaaggtattgttgagctacattaacccgctaacggttggtgctgcgtcgttgggtatcgccctggcggcaatcgctaaagctggttatgactcctggaaagcgcaacgagaactggcgaatgcgctggtgctgactggtggctatgctgcgaccaccaccgggcagatcacagccttaaccgaagagattaacaaaaactcatcggctacgattggcagcattcaggaaatcgcaacatcgctcgccagttctggtaagtacacaatcaaccagattaagcagatcacgaagactacggcggaatggtcggcgcagacgggtgagagcgagaagacgatcacagggtattttgattcgatcgcaaaagaccctgttaaggggcttgccgatctcaatgagcagtttaatttcctgaaagagggccagctaacctacatcgaatctttgcgtaaaaccaaaggcgagacggcagcagcagaggcggctacaaaactgtttgctgatactatggataagcgccttaaagatatcgcggacagcgcaacgccactcgaaacgatgtggacggatatcaaaaaatgggccgctgactcatggaaatgggtaggcgatcacacggtaggggcgctaaaccttatcgttgatacggtttccgcgatcattaacacgatcaggaagctgattgccgacggcgacgccatgatcgcgcagttcatcgttgacgctggccggaagctgcaaaaaattccaggaatgggcgactttggcaatgaatttctggcgcagcaggagcagctaatcaaggactcgaaagcgaaatccgacacgcttgcaaaaaccattgcggaacagcaggcaaggatcgcaaaaggcgaaatgggttacattgatgccgcgaaggataaaaccctttccggtgggtacagcagcaaaacgaaggatcgcgtaaatcaggaagaaaaagatatcctgaaaaaccgcaacgccaggaagcagcaggtagacgcgggcgttaaaattgatgagcagtatcaggctgaactgctatcgctacaggcgcagctaaaggttttgcagcagcacaaagggcttgacgacaagatcagccagcagcgcaaagactacttcgagacggttgctaaattccaggttttggaagaggcaagccagaagcgaaaactgacccaaagcgaacagcagatgctggcgaacaaaaagaatatcctgtacatggcggaacaaaaggccattgtgggagatcagattgttcagcagcagcgactgaacgccttgcttgacaagtctaccaagtatcaaaaccagatggcggagaagaccaaggcgctacaggataccgccggaatgggtagcaaggagcaggagagataccgggccaatgcgcagatggcggctgactggaaaaacaacggcggatctttaagtgaccctggatttaaagcgatgcaggccgcaagcgataaattctacgcacagcaagatgcgcaaatgatgaactggaaggccgggtttactaacgcgtgggctgacattggcgaagaagttaatgacgtatacaccaatatcggggatatcactaaaaacgcatttaacggcatggcgagcgtgctgactgattttgtcatgactggtaaggccagctttagcgacttcgcaaagagcgtgatcactgacattaccaacatgcttatcaagatggcgctgtttaactcgctttctgccgcgtttggtggtggtggaacgttcagcttcgccagcatgttcagcaaaggcttttctggcggcggttacactggcgacggcgggaagtatgagccaaaaggcgttgttcacggcggggaattcgtattcaccaaagaggcgacgcaaaggttaggcccggaaaacctgtaccgactaatgcgcggctatgcaagtggcggcctggttggtggtaacgcaagttccggatctggaatcaccaacggcggcaacgtcgcggcgtcggcggctatggtgtttaccattggtgatattaacatcacgatgggttccggtcaggatagcaaggggctagagcagggcgtaaggcagatcgtgaacgatatgttcaccgaggctttgagccaaaacgggcgcattgcgaagttcgtcaatgagaaaacgaggaggtagtagtggattcctttaaatggtgtacacaaatccaaggaggggcggcgaaagtcgccgtatccaataacgttcgggcgatcagcttcggaaatggctacatccaaactgcgtcgagcggcattaacacaaagcgccggactgttccgatcgtttatggcggttcggattgggaagcggtttataacttctgtcaggatcacgtaacaaagccttttgtgtggaaggcaccggatggaagaatgggcgtgttcgtcgtaactgccgactccgttaaccttgcgccgcagggtggcggggtgtttgaggtaacggctgaattcgccgaacgcttcacttcagccggataatcaaaaagcgccctttacgggtgcttttttttggcctatgatctggagtcaattagaggagggcttacgatgacagccaatgtttcaaaagattttgcgaactgcctacaaaaacttttccccggcgagatcctaacgctgatcgatatcgacgccacaaagttcggcgggcaggtctaccgattccataacgagaacgtcgcctatacaaccgaggagcttttggccgcggttaacggcgggacgcttcagccaaagatgatcacgtttcgcggcgagcagtacggcccgcgaccgttcggcctgggcgggatcgcaatgtcgagcgatggcacagtggaaaagccaacgctgacggttagcaatattgatgcgcaagcgagtgctcttattcgagcctataacggccttatgcaagccaaagttacggtatgggttttggtcaaggaattgctacaaaacgacggcagcgttaaagagggcgattttaggcgatttatttactacatcgagcgcccaaaacaggtcgacccgcaaaaggcaacgttcgaattaacatccgtgtttgatatggatggattaatgatcccggcccgtctgacgcaaaccgtttgctattgggcgcagcgtgggtggtacaagtctggcaaaggctgcgactacaacgggcagaacggatacttcgacaagttgggaaacagggttgaagacccgtcgcaagatgtttgtggcggcttggtttcttcttgcaggcttcgttttggcaatgaaccgttgagttttggcggttgtgcgacagcaacattgaaaagtggaaggtaatatgttaactccgaaaatcaaaatgcagatcatgcagcacgcgaaagaagtttacccgcatgagtgcgcaggtctggtgacgcaaaaatcacgagtgcaaaaatatcaccgactcgacaacgtttcgccagatcctgagaaagaatcaatgcctgatgaaacgcagtatgcgctggcatcaatggagggcgagccgatcgccttcgttcactcccacactggcgatggggcaaccacaattccgagcgccactgatttatgcttttgcgatgagtctggcttgtcgtgggttatcgtctccatcccggaaggtgatatgcgaatcattgagccgaaacgccgacctctgattggtcgcccctgggctttgggcgcttacgattgctatggcctaatcatggattttcacaagcgccacggcgtcacactaaaagatcggcgattgccgttcgaatggtggaagccggaatacaaagagaatctttaccaggattactggcaagaggacggattcattgaaaacactggcgagcctgaagttggcgatatgatcatcttccagattcaggcggaaaagtggaatcacgctggtatttacgttggaaacaataacatccttcatcacgcgtttggcaagctgtctcgcagggatatctattctggatggtacgagcagcacaaggttttaatttgcaggcacaaggagcttaaacatggcatcacatacaaagacgattaaactatccggttccctggggcgtcggttcggtgtcttccacaaacttgcggttgattcagtcgctgaatgcatccgggcgctgtcttaccaggttgaggggtttaagcctttcatgcagagcaaggttggtttaaatatgcgcttcggcgttgtcgccgacggaaaaccaatcagcgcgaacgaccttgcgacttttgccgtggcgagggagatcagaatcattccgatcccaaaagccagaaagaacggcgggttgttgcaggtcgttatcggagcggcgattatggttgcggccttctttactggcggcggctcgctggcggctatgggcgctttttcatcggctgcattcatggctggcggctcaatggttttgggtggcgtaatgcagatgatcgcaccgcagatgggcggcaatatgcgggcgagcgaatcgcctgagaataagccatcgtatgcgttcggcgggccgattaacaccacggcggcaggttatccaatccagttgccatacggttacagattggctggcggcgcattgttcggttctggatcttacgcagaagacaacaactaattaagccattcgctttttagcctgggggcgtagcctccgggctttttgtcgtgtacaattgcgagactattaacaggaggctaaacgatgactaatatcaaggcccgtaagggaggctcaagcaagccgcgtaccccggtagaaatgccagataacctgatctcaaaagacaagatcaagttattgctggctgtttctgatggcgaggtcgttaacgacttcagtttgaagcagttgcatttcggcggcgtcccggttcaaaacgaagatggaagttacaactatgaaggcgtgattgctgagtttcgccccggcacgcaaacacaggactacatccagggcttcagcgaatcaagtgctgagttccaggttgctcgtgaagtcactcacaacacgccttatacgcttaccgtatcgaacaaaaatctgtctgctattcgctttcgcctgttatggccgcgcgtgctgactcaaaaagataacggcgatatggtcggatcggttgttgagtacaagatcgagatggcggtagatggcgcaagttatcagacctacctaactggcaaaattgacggaaagaacacgactggcggttacgatcggagcattcgcgttaacctgccgcaaaacttcacgtcgcaggttcttatccgcgtgagccgagtaacgccggatgctgacggggtgaaggttgtcgatgccttccaggttcaatcctacgctgaggtcattgatgcaaaattccgctacccgttaacggccatgctttacgttgagttcgatagcgacctgttccagaaccagatcccaaccatctcactcaaaaagaaatggaaaattattcaggttccgagtaattacgatccgattaatcgcacatactccgggacgtgggacggtgtttttaagtgggcgtggagcaataacccggcatgggtgctttatgacctgatcatgaatcagcgctatggtttagaccagcgtgagttaggaatcccggttgataagtggtcgctgtatgaggtggcgcaatactgtgatgaacttgttcctgataatcgcggcgggatggaaccgcgctatttgatggatgtaattgttcaatcgcaggttgaggcgttccagttggtaagggatatttgttccgcgttccgtggaatgacgttctacaacggggaaagcctttcgattatcgtcgataagccgcgcgatccggtgtacctgtttacggctgataacgtcgttgatggcgttttcgttcggacgttcccaagcgaaaagacgatgtacacgtcgtgcaacgtcatgttcgacgacgaagaaaaccagtacgaacaggatgttgaaccagtattcaaccctgacgcagccatgcggttcggccacaacccgaccagcattacagcgatcggatgtaccagaaggacagaggcgaaccgccgtggtcgctggattctgcaaacgaacctaagcgccacaaccgtttcgttttctactggcctggaaggtatgattccttcttgcggcgatgtgatttacgttgcagatccgcattggcaatcggcctttaacctggtgctatcaggccgcgttatggaagtgtctggcgtgcaggtgttccttgcctaccgctgcgacgcgaaggctggcgacactctgatcctgaatacagacgacggcaagccagtgcgccgcacaatcgccagcgtttcggcggacggtaagaccatcacgctaaatgttgggtataactttgacgttgcgcctgacagcgtattcctgatcgagagcgatcagcttgcagcggaacagtatgtagtaacccggattgaaaagggtagtgatgacgacgaatttactttcgccatcacggctacgcagtacgatccgaacaagtatgacgcgatcgataacggggtaattaccgatggccgaccaacttcggttgtcgaccctgattcaatgggcgcaccgaaagacttaacgattagctctttctcccgcattgttcaggggatgagcgtcgagacgatggttatcggatggtctgccgtgcagtatgcaaaactgtacgaggtgcaatggcgcaaggacggtggtaactggaacaacgttccgcgcactgcgacaacgcaggttgatatcgaaggcatctatgctggcgagtatcaggcccgcgtgaggtgcattagcggtgggaatgtagcgtctccgtggtctgaattggcaaccgccacactgaccgggaaagtcggagcgccaaaaggcccgattaacctgtttgcgtcggacaatgagatcttcggcattcgagttaagtgggctatgccggaaggagcggaagacacggcatacattgagctttaccagtcgcaaagcggaaccgatcaggacgcaagcctgcttactctgattccttacccggcggctgaatactggcactcaattttgcccgctggctacgtgaacttctacaaagccagaagcgtagaccggatcggcaatgtttcagaatggactgattacgctcgcggcatgtcgtcgactgacgttaacatcatcacagatgcgatcctggatgaaatcctggatagcgacgcgatgaaggaactacaggaaaacgcacaggatagcgcggcaaaactcaatgactacgcgaacagcatcattcaaaatgcgctggcgaatgatgcggacgttaggaaaatgacgaaggagaacggtaagcgtaaggcagagatcgcgcataccacggtgctgattgccaacgaatcagaagcgagggcggctgaaattacgcaacttaaagcgcagattgatgaagatatcacgtcgcagattacgatccttaacgaagccctggcgacggaaagcgagacgagagcaacgcagattggtcagttgcaggcagattttgcggctgatattgacggcgtaaaaacaacaatgaacgctggttttacgcaggttaatcaggctattgcaaatgaaagtgacgcgcgtgcaagttccgaggcggcactagatgccaaaatcgggcagaactccgcagcgctaaaccagaaactcgactcgtgggcgaacgttaatggcgtcggttccatgtacacgatgaagttgggcttgaggtacaacggtcaggagtatagctccgggatggccctacagcttacctcaagtggtggaagcgttgtttcgcaggtgctgttcattgctgatagatttgctatcatccgtaatgcggcgtctggcgcgtacacgctaccgtttgttgtgcagaatgaccaagtgttcatgaataacgcgcttattcaggacggttcgattaccaacgcgaagatcggtaacgtcattcagtccaacaactttcaggagaatgttgcaggatggaggcttgataaaaacggcgtatttgtcaactatggctcaacttctggcgaaggttccatcaagcaaacgaaccagaacatcactgttcgagatggtagcgggcgcgttcgttgccagttgggtaggatcactggatcatggtaaaattaatgccgggagaaatcccggcttaaccaaaggaggcagacaatggcttatggttttcaatcatgggatgcgaacgggaaccccaacaactatgggatcgtccctgtttcagttgctggatatattgcattagcgcaaggccagaaaagcggaacgtggtattacaacgtcccgcctgggttgaggcttggtttcttttgggtcgcaaatcaagaccagtacggcacatcgaagaggcgaattaccgttagtggtaatcagatcgttgtttcagatgcgccagatgatgcgctggaatcaggcgtctacccggcgacgcaaggttttattgtcgttcaaattatgagttgatgattatggcagattacggaattttacttaccaatgatagcggcaatgtttgggtttcgcctcaaagcatcccactggcactactatcaaagcagagcatcactcttaggggtggtactaactccgatgaagtaagatcggtaacttacgacacgaatcacccatgcgttccgttcgtggtctttcatggatcttcgccacaaggtgcattcacaaaaatcaagtacagcggaaacacttgcagcgttgttttttcttttggtaagcaaaacgtatatgcggaggtttattttttctccgtgttcccacagccaaatcctggttatgggcttgcaatttgggatgaaaacggcacgctgattttgaccaatgaaaccagaacactttcagacgtacagacctacggcactggttttaatctaaacgtcactaacggcgggaagtgggcggttagtcctgttcagttaggcgcgatcgttggtgttgttcgcgatccctacccaagaccatttcagggcgactattgcgcagcggcattctttaacggctcaagcacgcaacttaccgcatatctaacgcaggcaccaggaggagccgccagcgatctaacctacgtcaatatgaaaaacacctgcatcgctattgattgcgcaagatacgactaaaagaaaggggccatacggcccctttttctaccccttgagatttttgatctcctcttttaattcatcaacttgagcagacagagctttgattgcgcaaattgcatccatcaaaagagcattattgtcaagcacaagtttcttattttcaactacgttaccctcatcatcctgataggatgcgctgctttctttaacgtagcacgaatcgatatctcgcacctgctgtgcaataactcccctacgctcgcgtttcttaacatcatccttataggtgaacttgaccagattcattgctttgatgttttcgagtgactgcaaaccatcataagcaacaacattgtctttgtagttaatgtcagatagaccagcaaaaacaacgttgccataagcagtgcttgcaatattaccatctgatttaaactgccaatactgcgtattaccgccagttccccatttgctgacctcaataacggcacgatgttcataacccctatgttcctcaagccacatagcgcaacgcgcaccgttaccattaatgttgaaccgtgagataaatgatggagatttaaggatatcaccattattcccatttggatcgctagttggccacgctacaaaagcatcattaacggtactcctcacagtcccatatgacacaacacttccgcgaagatcggcagccccgccaactcgcaacgtgctcgacattgtaacagcgccgcgaagatcggcagccccgtcagcacgcaacgtgcttgacattgtaacagcattgctaaagtttgcattcaacccggtaacagcaaagttcgatgcatcaaaaacaacctgcttcgcgctgttcatatctccattagggcggaagtacattccttgaccattttcagggattgagtacacgatcgcattgctgttatttgccctaatagtgcaaccgttcagggtcagcgtggcgtttcctccaggaacgctaattgcctgcggctggctgaacgtgttagctacgttggtgcgcgggatcgtattatcattagccatcaaatagtcagacggtgaattatatacaattccagaaggctccgtgtcaatccaggtataaccagtgcgatcaatgattggccccgtaatcgaccctttgttagcctgtacgtttacatgattcaaccacagttcaggaacccatccgccgggagcatgaatataaacatcaaacgaggagtctgtgtttttcaccaccccaagattaatgcgtctggtgtcgtttggtctggcagcaatcagggtgcgctgagtaaaccaagtgtcaatattattactggttagcgtatcgggaagaccgcggccagaaatcgaaaagatatcaaccgggagatttgcagtgccataaccagtacctccgccaatgatgaactgagcaaatgcgtagccatcaccagcgttcttgacgttggcgatcttcatccacttctccccagcgaaagtgccagtaattttatccggcacctggacgccagccacaaggtcgacaacctgatcacgaagattttgcgtctgccccttcgcagtttgcgcgtcgttcttcgccgagttggccgcagtttctgacgcttttgcattggtctccgaggttttggctgcggtttctgatgcctttgcattggtctccgagtttttggccgcagtttctgacgctttggcgttggtctctgaggtcttcgctgcggtttctgatgcctttgcgttagtctccgacgtcttcgcagcattcttggatgcagcagcattggtctctgaagtctttgcagcggtttctgatgcctttgcattggtctccgaggttttggccttattctccgaagatttagcgttcgtctctgaggtcttcgctgcggtttctgacgctttggcgttggtctctgaagtttttgcagcgctttcagacgcagccgcagccgtagcgcttgcgcccgcagcttcggaatctgccctcacctgatcggcaagactttgcagagcttcgaaatcgaagttcttaaagaagtcgacagcatccgcaatttgagtttcctgtgactggtagtagcgcagagtttccgcaacatcttgcgccagtccgtcaacggtcagcgagtcacttaacaggatcgcgtaatcgctagacgctacgacagcgccttttgtggtgatggctttaatttcagtatcgctaaccaccttgtttacgacggccatttgaattggtgacgacaaaaacataatcgtcgcaccagggcgaatcagcgaaagcgatgattgccattttgtgccagtcccggtaacggttccgtctgcggccatagccgctttgccttctctgtatagtgccatgtttttaagcctcattggttgattgagtaacgcagataatagcatcaatgaaccgataaaaaaaggagcctttcggctcctttagttgtcaaattagaacgggatatcatcatcgaaatccatccccgcattcccgccgctgttttgcggcttaggcgcttgttgcggcttgggttgttgaggctggccccacccggattgctgattgccgccgccgctttgcgaaggatcgcgctggctgaattcgagttgcggcataatcatttcgttgtggctgtaaattgtgccgttgtgctcgcggttaacgatctgaagcgtccggcaggttacgctgatcaccttatccatttgcagcgcttcgtcgtaccacttaatcatgttttcttttgcaaagaaaactgcgcggtagttcgtgtaaattgtttcgtcctcgccatcacgattgcggatcttcatccgctccgacaggtctacggcgtacattttccacggcccgttattgttgctgccctctttgacataaggcgcttttcggattacccctgttacaacatgcattgtcattcctatggggcggcttcccgcccgttaaattagttgaaagatgaaatatcttgcgcttctggttcaggttttgattctaccttttccggctcgcgcttcgcaacctcttgcggtttaccggggttaaatccgtttgccggggtgactttcagttctgcctggcgtttggtgatatcgtcttccgtcattttccactccgccggggttaacgtttgtttcgccagcttatagatctcacgaagcgattcgagatcttcgcacgcgtcaatgcgttttttgaagtctttcggtgtcattttcgtaatttctgcatcatcatccgcctgcttgatacctagcgctgcggccagcgcataacggcgggcgtaagatgttgttgagccgtatgcttgttcgacggttttactgatcggcatattgtactgaaacgccatgaactcgccgctttcatgcaaaaacatagtttcgaggtgcatcaccttttcggtgctcgtatccatcatggattgaatgaccataattttgttcttctccagcgccggggaaatagcgtcgaggatatccccaagattcgcataggtgttcccaagatggttgttcttaccgcttttctttgcggccacgaagccagattttgccttgattaatgcggctgcgatggtggtaaatttttcagatgtacgcatgataaagtttccttttcctaattggtaatgcgcactatatcacaagtgcgcaccagtgtttagctatttgtgccgtatacgtccgggaacatgtatttcacaaactgaggagtcggcaaaacaacttccgccgcgtttgactcatatgatggccatgaatcgtgcttcacgcattcagcatactgatgaatcacgctttgatactgtttgcgaccgatctcgatctgctggctggtcagggtgaacgccagcggagcaaacggtgattttttctcctgcgttagcagtctgacaactaccgggcgtttttcgttgtaagtcttcacgaacagatcgcgctgcaatgccatcttgagatagtagcccaagttgaaggcgagtcgcccgaaatcgtcaggcttggaagattgcgtggttttgtagtcggtaatcaccacgacctcgaaaacctcatccgggttgaacccccactccttgatgagttcgggatcggaaacaacgtcaacatgatcgagtcgaaccttaaccttgacgccgaagatctcaccgaagattgacaattcacgctgtgctgtaggcgattcgatacatgcggcgtgtcgcgggttagccagcatcacgctgcgcatttgaacaacggcatcgaaatcaacatccttaaccagcttgcgcccggagtttatcgcggcgctttcgtcgcacagttcaatagcccaccaaacatttacgtcaatcccggcgcgatatgccatttccagaagttccgggtaatccttgttggacgtcccaatcaggccacacgctttcagcttcgcagacagtgccgacttcgacgtaatcagatctttaacctcgcccggagaagtcgcccgcaggtactcgccattaaactttgccgtctcaagcatacaggtatgcgaacaggttccgaacgccagcgcggctgcttcctcacgcactttgaatttccagtgcgccggggatgttgcgtaaatctcgccgaggcttgagccgctaacgtattccgcgcaccaggagttaggatcgtggtaatcatcgttggataattccgcgttggtgtatgccttaaaaattgcttcagccattggtatcactccatttgtggtttcgttgcgttaagtatacgcatgacgattccaggcgcaagtcaaaaagtgctatccgcagttggttaaaaaacgagcgaaatttacgtaagatttagtaagatgcatcttacgtgatttttcctatatatttcatttagttaatgcaaatcggtaagatggtaatatccctataggtaaatatccatgaaaaatatggcgcgaaatccagcgaaaaaagacacgcaccccggagaaatcttaccaagattgatagatacagatagagtaataataataatattgttatttatcatatacttactatctatatattgcggttaattggttaaattttgcgcgaaatttacgtaagattcatcttactaaatcttacctaaagtggttcgaccagctgcaagccactgaatttcaggaataaaaaaaggtaagactgattttgctcaatcttacctaaaatctgatcaatatttaatcagagaagcgacgatgccttgtacaacttacgttcaaatccgagcttaaagttgtcaccgttcggaacgataactttaagatcccgatcgtcagcagccgccagcatatcccgatctccacgacggcaaactacccgcatttctcgcttaccttttccgcccttgcctttatacctgtacgccacgatctcgacgtttgaaggtatgatgcaggcccaaacgtcgcacttgaacgaactagcaatattgaagtgcatcgcctcaatccaggattgagcaaggtaaattggcccgttaccgtcgtcgctctgattggtcactatcaccgatccgaatgtcagatcgccagccaacatcttctcccgaccctcctcatcaatgaacagcatgttgcaatactcatcatccggcccatcctcatgcactagttgcattggtagcgcgtgaattagctcctgtctgcagttctcgtgagtttttacgccaaccagatatgatttgatatgctcattttcaatgccctcatagagcgttacaggcgtgctatcgacggcctccgttctgtttaaaactgccatcactctttcatgatctgccatctttccgtagtcatacccgttatcacgagctacctgcttgtttctcttgactacgtattcttgcggaacctttccgagatagcgcccaagaatgttgatgcactcgctatacggctggccgcttaacttcattaaccagccgatccccttatcggcaccgcaaccgccacagtatgcgccgccatcacctcgcgtttccagcttgtcagtccagcggaatcggtctttgccgccgcagttcgggcagtcctggtgcttgccgttgaagtatcgagagtggatgccgcaaatgttctgcaacgcctcgcgccacatgccagccatgtacggcaaaacctctttttcatcgtaaaaatccacgtcgtaacccccaaataaaaaacgcctacacgagaatgataacccggcaggcgtttagtgtttagtcaaattgtgctatcggactacgcggagcatttcgcggcggtcgcatcggcgcgtcactggcttgccgttgctgtcaaatcttaaatcaggtcggcagaatgaggcgcgaaaacctttgcaattgttccgtcggtagctcttatgtactagataagcgccatcggctgagatcataccgcgcttacgccactgctgaacaacctggatactaactcccaactcttttgccgttccagcgataccaccgaaggcatcaataaccagctccatccgcgcagtcaacccagctcgaacctcatccttcagcacgtagtaaccagtcggtcgcttgcgtttcttcttatctttcccgcgcgacgttccgttgttgccgttcaaggttcgcttatcaaccattgccatttgctccataattcaaccctcatagcattttttgttaaacctgataaaatgttccatgtattatacacgcaactatgcgaatgacaaattaggattgacaatggcaagcacagaagaagacgtagcatattttaagcgactatttcgttatgaaggcggaacactgattcgcaaagttacaaccagtagtcgtgcattcgctggagactccgtagggtgcgagaacaacgttgggtatttacaggtaagcgtaaaaagcaaacccctatacgttcaccgaatcatttgggaaatgcataatgggcctatcccagaaggaatggagatagatcacatcaaccaggtcagaacagataacagaatcgaaaacctgcgactggtaagccaccaagtaaaccttaaaaaccaatcgatgaacagtggcaatactagcgggcacgctggcgtaagctggtttaagcgaggcggtaagtggagggcaacaataaaggttggcggaaggcaaatacacattggttacttcgcgtcgtttgagtcggcagttgccgcacgaaaagcagcagaaaaacaatatggttttcatgataaccacggagcagagaaaaagaaatgagcttatcgattgagcaacaaatagatctatacgcagacaaaatcccggcaatccaaaagagatttaccgttggaaatatcgttccgtatccatatcaggctgtggcttatattgagacagccaaaagaatagcaaactacaccgcaccgttttacattaaggcttcggtttccgccgggaaaaccatcatgatcgccatgctcgcagcgcagtgcaaggcaatgaacttacccatgatggttcttgctcgccaggccgagatcgtgaagcaggattccgaggagatcagtaacctcgacgttccaaactccgtttattgtgccgggttaggcacgaaggcggcatacttcccgatcgtcgtcggatctgaagggacggtggttaatggcctgtttaaaatgctgggcgactacgtgccttcagttctggctattgacgaatgccaccaggttgactggcaagatctggcggaagcgatcgccaacaatgaatcgttcgagtacatgagccgaccgaaggataagccgtatcgcgtgaacggggaactggtcgatgccgaccacccatacgacgaaaaattcgactacgtagaattcggcggcggtcgaacacagtacaccatcgtcatttgtgagttaatgcggaggtgccttgagaagacagggcgagaacttcgcatcgttggctatacgggttcggagtttcgcggcgtcattccgattttacaggaagacaagagccagcctggtttttggcgcgagcagatcaccgacattaacacaaactatcttgtcgagttcggatcggtggttccgacaatttttggtgatactgaatccgaagggttagggtatgacctgtcagaattccacggttccagtcaggacggtacgcaggattttagcgcggaagaattgcgcaagatggaaaagaaaatccatgaatccggcgaaatgacgaagctgattatgcaaaaggtcgtggagcgtgcgaaaacccgaaacggagttctgataacttgcgctggacagcggcattgcaaggaggcggcgagctatctaccgccggacgcaacatacgcgatcatcaccgaaaagacgaactcaaagaaacgcggcgaaattttggataaggcgaatcgcggggagattaaatacatcttccaggtgatggccctaaccactggcgttaacgttccgttttgggatttttcggtgatattgcgcaagatcggatcgcttacgttgcttattcagcttttggggcgaggtatgcggcttctaaaggactggcaaaaacagcctccttactcgtgggtgaaagaagatcaccttgtctgggattttgccggaacaatggatgaccttggccagttgtatttcgatccgattttggagcaggcgcaataccaaagacgcaagagcagcaagaacggccccaaaatttgcccggtatgcaagggagaaaatagcgagtacgcccgccgatgcatccacaaagacagcaacggcaatcgttgcgaatatttctggatatcgcagcgctgcgaagaccagaaagacccgcgaacagggaagattaaggtaaaaggttgttacgccgaaaacgatattgttgcccgccagtgcagatgttgtggggtgcagcttaaagatcccaacgacaatctcaccgggaagcattatacgcagaatgactggtatgatgttgtcgggttcgatatcggcttgactcgcaatcagtccgggatcatcttcaattacgtgttactgaaccatgacggcgagcggttcaccgccagggaaaagttcttcccggaatcagagaatcagatttgcggcaagttgtggcggcaaaaggcagtctcccagcacgttgacgacgcggtaatgcgtggcaagttgggcggtatgaaaaacgcccgcaagatcctggagtatgcggaatacttccgcgcaccgaagcgcgtaacgcatcgcatcaacggcaagaaggaagatattatttcacgcaaagattttggagacgcagaatgatcgcagataaaggtgattatctcgaatactacggcgggcctgtgaaggcttgtccgcttgagaaaatcgatcagatgaatagcgtttcgtggctgcggcacgaataccctgattatctgttctggcacacagtcaatgaaggcagcaagcacaaggcgagcgcggttatcgatcatcaaatgggattgcttaaaggcgttagcgacttcgttatcctgattggtttcggtggcaaatacccgttcgcagccattgagctaaagcgccagggtaaggcgcaggcgtcgccagtgagcaaggagcaaagggaattccttgctgccgcccggcgtcgcggcggattcgccgccgtggcctatggcttcgagcaattcaagattgctttctgcgatgccataaaatagcactttttgttaaaaccgcccggcgaaagccgggtatcatttccacatcgaaacgaagaatggagtgttgaaaatgaaaaagatgctggctttagttgttctgtctcttggtcttattggttgcagcgaaaaaccgaaaacatatgattgcggtggtgaagcgtttgaggtaactagcaactatatgaaagttgtcaagggtgaaaactctggcgttataattgatggcgctggcgaaaatcaatataaactgcttactccttttgggtacgctcattatgcagtcaacaaaaacactattgatgttagcgtgggcgcttttcacaataccttaacctgcgaggttaaataataatggcaaaagatatcgcagacaaagacactcatgacgcattcatcacgtttgagcaattggagcgcgaaacgtttattggcaacgcccttgccactggcggacactatcaagccgtcaggccagataagttctatcaggtaactggcaaccgatacgcaggtagtaaaacgccggatattgtgcgcgacaagtgggcgacagatcgaagtctgatcgcatacatggaagagcgttacggcaattacgatcttgatgtcgccgcagaccgaagcaacgcagtttgcccgaagttctacgacgaaaaaacggattgccttaaacgctggtgggggaaaaacaagcacatttggctgaatcctccttactcgtttccagatccgtttattctcaaggccattgagcaaatggagcacgacaaccagatcgacattctgctacccggcgacaattctactgcctggttccgtgacgcgcagaagatggccgccgaaattatctggattgttgccgatgttgaagaggatgattacgggaacaagttaagtcgatccggtcgcctcgccttcatcaatggattaagcgggaatccagtcgacaacaacaataagggaagtgttattttcatcatgcgcaagctcaagccgggagaggagcaaaagacactttacattccggtaagcgagatttgcccgtcattagctaaaaagcgtatgcgcaaacgtgggatctgaaaaatggaacagacagagtctttcgccgagtatcttcggatcgttgttgaacttctggacaagcacggcttcattgggacggatgaggaaaagttagcctttgctgacaccatcgacggaacctacatggagttcatggacaacggaaccccggtcgctgactggccagaaattcttgaacgagaattgattgagtttaaatcacatgaaggcgcggagtatttcgcaaaacagcactaattgctaaacaatacccgccgcgtgcgggtattattactccaccaaccaatcaggagcaaacgccatgaaaaccaaaaccattgcagacaccatcaagatcgtaccagtaaaagcgcaagtggtatcgcgtcaactggttaacctgtctcgcctgtgcatggccgactacatggcgaacccttcagataattgccttgatggtgtagtcggtgagatttattttcgcgctggttatggactggaaagcgtggccatgtatgagcaaatggccgaaggtttttgcatttacggtgacgaatgatgattgtcgagactggtcgcgctgccgtatggcagcacgcaaaagaagcgggaataagtgatgatatcgtgaagatctcaaagtatttcgatatcaaagatatatcaattatctttggtgggaagctcacctatctaaacgagcgcccggtgaagcgcacgcgaatagcagtggcaacgcgtgcggaggccgacgcgctgaagatgttcatacatgagtcgaaacagcagaaaaaatattacaagtagcgggggcgtgaagaatgcgatatattgcgatcctatttacggcgatcctgttcacgatcgcaatcatgaactgcgcaattcaattaggataaattatgttaccgaaaatcacagacgaagaattcttagccgcccgcgaggaaggtaagacctaccgcgagatcgcggaagagttcggcatgaacattcgaagcgttgaacgtcgtggcgttcgcctggcacgacaaggacacctacacggaaacgcccacgtttcgaagcatatcccggacggcttcggcgtcaaaggcacgtcgacgatgattcgcgcggacggctccgaggtcgttcggtgggtcaagtcggaagtagacagagatcgcatggtcgcgcttatggaggcggcgcaggcggctttctgcgaagaccttccgcgagctgaaccgcaaccgctggatgagtcgaagttctacattgaagatcagcttgccctgtacccaatcttcgacctgcatattggggctatggcgcataagcatgaatgcggcgagaactatgataccagcacggcagagaaggttctaaaccgcttctttgattattccgtgtcggtggctccgcaatccaaaaaggctgttttgctggttggcggtgacttccttcacagcgacggcctggacgcagtaaccccggcaagtggtcacgttctcgatcaggacagccgatacgcaaaacttgtttatgttgccatccgctcgctgcgtcgcgccgtgtcgctactgcttaacaatcatgccgaagttgaagtgcaggtaatcgaaggcaaccacgaccaggccgggatgatttggctacgcgcagcgctggcggcgttctatgagaatgaaccgcgcgtttttgttgatgttagccctgcgatcctgcatcgcaccttgtggggcaaaaccatgctgggctacacgcatggccacacgatgaagaagcctgaaacgcgccttgctgcgatggctaccgacttccgcaaggagttcggccagtgcgactacatttacacgcattccggccactggcatcaccagactgtaacggaacactcgttaggtattgacgaggtgcatggccagttaggggccaaagacgcttacgccgctcgcggtggttggcgctcctatcgccaggcggcggttattctgtacagcaaagaatatggcgaagtaggccgctttatctaccgcccgaacatgtaaccacaacggccccgcgaggggccaacaaggaaaaccgatgaatagaaatatctgcattttcgatctcgatggcacgttgtccaatggcaaccaccgcttgcacctgctgccgaaaaaggatctccaccttacagaaagttggagtgaatttaatggtgcatcaattggcgacagcccaatccaaagcacaattgatgtagcgaatgcgcttcatcgctccgggatgattgtcgttatcctgaccgggcgatccgatgaggtgaagaccgaaacaatgatttggcttgaccgttacggggtgaaatatgacaggctcatcatgcgtcgcgccagcgacaaccgtaaagacacggtaatcaaggaggaggagttacgcaaaatcggaattgatcgcattgttgcggcatgggatgattcacccaatgttattgcgcacttgcgcggcctgggtattacgacttaccaggtctgcgactacggagacaatcttcaagatcatttaaaatcgcacggagtagacaaatgaaaaatgtaattattctcaacggagcacccggaatcggaaaagataccatcgcggaaattatctcgcggaagtgggaatacaagaaccttagcttcaaacagcctatgtttgccatcgcgcgtgctgtgcttggatctactgattttgcacgctttaccgccagataccacgaccgcaagcacaaagaagtgaaatgcgattttttgggcgaccgttctccgcgtgaattcatgattcacattagcgaaaacttcgtcaagccgaccctgggcaaaaatcagttcggcaagttgctttgcgattcagcgctaacttcgccgtttaactgcatcgtcagcgacggcggttttgatgaggaggtcgagcacgtcgcagcgcatgaggcgcttaacgtatttgtcgtccgccttcatcgtgacggcatgacctttgagggtgatagccgcaaacacattcgacgacccgatctgatttgtgacacgtatcacgaacttgattttgatatgaccactggcgagcctgaagacgacgcgcaaaaaatccttgatatggtttcagatgttgcattaaaattataaagttaatgcctttattatcaccaccttaacgattgggaaccttgacgggttcccttttttttgttcttaattttgccaaatgaatatatcatcaccttaccatttaactaacagaggttgcatatcatgcgggaattcatcaacgcggcaaccaatagcagcggcggtgttgcccttgcgggatctgcatccgggcaattaatcattgctgccattggtttatttttcatgatcttatttggctcaatcggcacgtggctgaagtggaaagactcaaaagccatccgggaggcgattgattctggcgacattaaagaggcattgaggatcaggagcaaataaaatgggaatgaaaacgcggcttactttcgcggcggcggtggcgatcgcggtcgcgttcctccccgaagtggaggacactaaatacacggtttatacggatatcgctggcgtaccaactgtatgcgaaggaatcacaggcccggacgttatcaaggggaaaacctatacccggtcagagtgcgacgcgcttttaaccaagcatatccaggtagcaaagcgaaccgttgacagcaaaatcaaagtagatgttcctgacaccttcagggcgtcgatgtacagcttcacgttcaacgctggcggcggcgcatattctggcagcaccatgctgaaattaacgaaccagggccgattgcgcgaggcgtgcgagcagctatatcgctggacgtactaccgcaacccgaaaacgggtaagatggagaagtcaaaaggcttgcataatcgccgggttcaggaatatcaactatgcattaaggatctaaaatgattaaggtaattggtgtggctcttacggttgttcttctgtctggttgcgcttccagtgtcccgatcctttccgatctggtgggcagcaagccggatatgacggcgcaagtaggcgcggagaacgttaaacaggcggttggcgtgacgaacaaaacggacacgtcaagcaagcaggagactacgttcaaagagtcggcggtaggaaaggttgacacgtcgaacaaaaaatccgtaacgacctccagcattcacgccaaccagatcacggcggacaagatcgagatccgaaacgatgaaagcggaagcctgactccgtggctgattggtggtgttggggttgtaatgctggcgataggtgcgttcggtctttggcgggaacgaaaaaacaaaggggcgtaatgcccctttttctatatgtaccgcttgacgtgcaatagcgctactccgtcttcatcgttaagaccatgttcaaccgtgttggttgcagccattccttgatagagcaagatgagcgcggcacgcaagtaattttctggtgtgatctgtttcacacaaacaagcctgtgaacttccgttatcagatcttccacctggtttcccgaaaagctgttcatcactgagttggtcaaggtgcatcatctcccatatgtatcggttatccatcccttcgaacgaccggaaatcaaaacctatttccctgttatccggccccgtacaccacacagagccgttttttccgtcaaggtatccattcgtatagcttcgcgctaaaaactccttagagaccattgaggcgaacatacgttgcgatacgttggcggcttttgccagtcgaggcgcttcgcggtgcgtatagacgaacttcgcaaaatcctgccgggtgaactcccggcgagattcgcagaacttgtaaatgtcaagaataaacatcaattacctcatgaacgacgggttgataaagacttcggaatccatcacgcagataaagcctaattcctccatcttcggcaataagcgttccttaatctttttgctcaccccggcctggcctttgaagatcttcaggttgcggcaggcgttataaatgccctggacggtcataacaccttttgcctgtttgcagcgactggcgataacgtcatacatcgctttaatttccgctccctcaccagcaaagccggaagagtcagccgacgacaaatacgttttgctcaattcatggaacataatgatcgcttcgtcaatggtcgccgtgtcgatcttcttcgagcgcttcccgccgggttgccagttccggatcgtgtgaatcacggacgccagacgcataacctgcttatcaaacttacccatcgcgccgcgaagcattgtatgcgaatacttgccgccgtcgcctaactccggttctaactcctggcgggccttgttcagcctacgcattgccgcgtcagtaacctgcaacttaatgttcgactcgctcataatgtcatgaatcagccggaagtaatccgccttcagtgactggtcgatcggctcataggtcgaattcccgttttcgtcgatgaacacgcgttcacccaaacgggtttgctcacgaaccaaaaggaagcgttcagataccccgatcccgcgagagccggcctgcataatggcgtcgatggtttcatcctgggcaattacgcaaatgcagcccaaagcctcgaatgacatattgttgctaacgtcggcacgagcgatcgatacgtggcctttatcccatgctttgagcaccagttcgctgttcgtcttcttaccgccatcgtttccatacgtgatccctaaaaggctgttaaccgccgtcgcctcatcggaaataacggcaaagtttccctgtcggttgttaatcttcgccagaccttccggggtggtatcagataccgggaaagttaggtcacacaatttttctaacttctcctcaagttcgtcacggtcttcaaaaagtttcaccatatcagattgcgataactccccttttagcgcctgcttgttggcggacagcttcgccatgattttcttacgctctttctttcgagactcgttaatgcgttcgacttcggcgacaataggatcgatggcaagcgagttaatggcagacttaccagcggaaggcggctgcgacgtgataacgtaaagcgttgtcggttgctcgctgccgtggtactcgacccaaaagcggcccatcatcgcggcggatacggttccgagaaagtgcatgtaagcggatgattccgggaactgaacagaacgcgctgcatttagcgccagcttgccgacaacatcataatcattggcgatcgagattgttggatacttatccgcgtttacgtcgatatctttgggctttggccagaatgaaacggagtcacgatacccgttcgcacgaatcgcaacgcgcaggggactgatcccctccctttctgcgatggcgataatatcttgcggtgatacgcggtcatttaaaaacatgcccttgctcctgattggttaatcgttcggctaatcatatgccgtattaaatccgagatccagtgataatctaaacacgcttgaaaaacgcgcttggattatcggggcgcatggccccgaacccgtcacaggtatttagcttcgaaagtcgttccgtccgatacactgaagccaacttcctcgcggtacagcgtccagcggcatccatcacgatcgaagatgtatccggcaaccgcgccgagcgcacgaccgctttctacctggtagcgcttgccgacgctgaaggattttttcatcgggttgctatggtcaaggccgacgcattttagcgttttggtttttagttcgatgaacgtcgcaatcacctggccaccagcgccagcaataaacaactcgccgctaacgcctaccgacaaaataacgcgcttcttcttcagttcgacgctgtcatataccatcattgacacattgccttcatcgtcgacgcgggcgggataaaggttattttcgtgtatattaatagcgcggcttgacgtgcatttaatcttgattgacttcgccatttattttctttctccgatctcgatgtacaggtttaccaaatccagaaagtcagccttgcttttgcaacccaacttaaagccaacgtgcgactcaattttattttgcatcgcagccagtgttgcgccgccattattcatcctgagaacttcgcggcatacttcggcgagcttttgagatatcatttcttcaccacctttatttccatgccttcgcaagcgctcttgatatcattaatcagacgattaagccttaaatcagtcattacatggtgatgacgtatatcaataattccagcaacgactaacagcatgacggcaaagataaaaccaccaggcccggacatacacaaaacagttaacatcatcaagataataaatttcatttccgttttactccgttgcgtttcgatggggtgattctacccgactttcgccgggtagttttagaaattcgtgctattctcgataattcgcctggaacacggcgcgggcaaaacctcgcggagtaatggaacgcagcattttagtcctttctgaccttccacccaaaaacttccaggcccaaaagaaattcacgccttctactccatccggcggcgtgagccgtttcggttcgacaaaaccgtttccgtgccatatgcacgttttcttcgtgtaattgtcacagtggggcattttgggatgccacacaggctcgttcggagaaacatagccaccgaagtcgcgcggatggaaataaaaatccggctttcgccatagtgacgataatttcccgaccgggttttcgaccatccaggggcaaccatacttattgcctaattgctcgaccatcttcgcatcccctgctgcggataatacgtcattatcttcccttacgtgcttgattccgctatgcgctaacagcgtgcatggcgggaaagcgaaaatgaagtcaggatctggaatgccgagaatcgatcgcttaacgtcaaaatccttgtcaatccaaatgttaacatactggatatttgggtgaaccattcgaatgctatattctccgtggtcgccggagtcggcgttgaaacagtacaccttgcatcccttgatggcccacggcaggcccatgatgccggagccgtcgaacatgcagtaaataaccttttctttcatgctttccacgcctcaatgaacattctgttcgattccagcgtcagcgtgacgccagccagggaggactgaatgagacgaccgcccggaaccgtcccgatgatgtagcggcctttcgacttcgtgatcgtgatctgagtgaagccggaggcgcggttcatgcggagaacgacgcggccatgagcgttcaggacggcgagaatggaatcagtcttcggatggttcattgtgtagctccttcgtttgttggtatggggacagtatgccactatcccgctgtgttgttttagcaaaacgtgctattccggaacgcaggtcgcgtaatcctggctgatgtagatcgtgcgctgaacgcgaggttcgagatcaccgagttcctggatggtaacatcgttgcttcctacccggcacggaaccgatccgaaaataaactcgccagtctgcttgtcgttgatttgccatacattaccgccttcctttttgacaaccaggaaaggcgcactgtctgcactgaactcttccgggccacgaccgtagtaatgcgtgatcgcagctttggccgcagcgctgaaggcatcggtaacgtcattggtcgccttgtctcggatggccttgatacgttcttcaggcgatccgatgatgtaggaaaagctgttcgaaatggtaactgttcgcattatattttaacctcgttttggtggatgaagtcggcgacgtaatggcattcgatcgggttctcgatacccgccagcacctcgcaagacccgttattcagtagctggcaatgctggcactccgcaccgccaacactggcaatgacaatggcgatcccgttgcatgaaccgccgaacattcgatgagggaagtggtaagcatcgcaggtgcaaaccacctccccggcccgccgtttcctcatacctggcccttctcgatgcagaaaacccaatcacgagcgtcaaccgcaaagcgtgcaacgccgtcgagcaccacgaagacagtaaacccgttgacgccgcgacccttctcgatatcggtcacggtgcggaacagatcgcttgcgccatattgaattttatccccgacgactacatccgcaaatgctttcatggttaatctcctgactggtttcgatgggttaactataccaggcctcgcggcccggcgtttagcaattcgtgcttatttcactgctttcttcgctgccttgtacgcctctttgaaagccggaacatcttcgaccggaatccagaagccggagccatagccatcgtcatagcaagggcattggtcgcagtagtcgccccaggttttctcttctccgccgacagagaatccagtgggcattttgcataacgcttcctcaaccgcttcgatcttgtcggcgtcgctatccatgataacgaagttccacttgccgttatactcgctgcccaggttgattgattcgcgttgaagtttcatagctttagcccctttggctcaattcgtttcgttgaagtcatcatagcaaagccgatcggatggattttaacaaaaaatgctattcctgcgattgctgattattccaccgattcggaatagtggaatagatggtgattgcacctgattccctggtgattagttttgacgaatcatgattgcttttgattgtttcattttgtgcaacgattttgtgagtgtttcaggatttgcaacgaattgcataaatgtatgcaccatgcacgcaatttgccgatcgaagccagcaaaagcgccaggtgtttttcgccaacatttacgtcgtgtggaaatgtgggggaggaataatcttacctaaaaattgcgcaaaaagtgaccaacataagcctataatagatatataagtatatgataaataataatattattattattactctttatctatatatatgtttggtaagatttcttcggggaggttatggattcctcttgcgcaagccatagtttttagatgttccgccgcgaaaaaatgtatatagggatatataggggatgacagcaaatcttaccaaacacgcttaaacccttttacggcaaggcttgcgggtggtaagatgacattcccacacaagcaaaaacgacgtaaatgttggagaaaaacacatgcaatataaaggctatgagttcgaagaagtcgacgtgtccgagtggatgcagtacgacgcagataagcaggcagcttaccatgaatggctgcaatccatcacgtttggcggctcaccaggggtagacgatcggccagttgctgaaaagtcacccgccgcattcactggtaatcgttcgtccgagatccggcgcatgttcctggatggcgggcgacgtatccagatgacggcggaggagttcgcggataagttcggcgttcatccggtcgacaaccatttccgcaggccgttgctgaaactcctggagccgggagaagtgttgcgggtgagcctgggggcggggttgatctccgtctttaccgagttcgacgcaatgactggctcaaacatggaggctgaggcatacaggcggcagggcgctatctccgagagggaaaggattaagggtttagtggccgctcttgctgtagactttgccggacatgccctggccgggatttacaaggcgaacttgttcgcggctatcgatcttggattgaccgccagcgatatcagccaggaagcggccaccacgcaatagcactttttgttaaaacccggtcagagcgatcgggtattgtctttccatcgacaacgaaccgaggaaaacgaaatggtcactcttatcacatgggaacacgaaaacagcgagccagtggtgcgcgaattcgagaccgtagcggcatgttacaacctggcggcaaatggtggcttttacaaggcgcagatcgttaacgagttcggggttgttgattatgaattttaaggcgagcgacgtaaaacctggcgtggtctacggatcgcgcctcaataaccgcctttggcggtgggacggcgaaactatgtggactaaaggcgagggcgatgttatctggcatgaatgcggctggccataccccaccatgagccgcctcgatatcgcttattatctttcggttggcgatatgcacgagatggaagatagcactttttgctaaaacactgctgtcgagatccggtattatttattcatcgacaacaaagaggagatgaaaatgagcaagaagaatccatattcaaccagcaactaccataacgaacacgtcatgcgctggcactggcagaaactcaaagaacgccaccttgcacgccatggcaaataatcacaatagcgccgcttcggtggcgctgtatcccaaccataaaaacggcttacaccaggaggattggccatgccacgattttcagcaacaacaaaacttcgcaccttcgccgggatgccgatcccatactcatcaaccaaagccgtccagggcagcgagcacggcgtatacttccactggtgcggcaagtggcgcttcaccgtcattcgcggcttttacgtgacctgcgaccacgtggatattaccgactattccggcggaaaccaggttcatgagttcaataggcacgaatagcactttttgctaaaactcgatcggggcaatgcgttattattaccccatcgaaacagaggagcaaaaaacatgattggcaaccacaacaacgaactgaacgcagcagcccaccgtcgcgccgtcgagcagaacttcaacgcgcttaaagtagcctgcgatgagatgaaagcaatgcttgaactgccgtcatgggatccccaactcgaagactattacgacggcctccgcgtcaagcgtgacgatatcatcaaccgcctgcgcctggctggaatgtttctgtaaggagaacgcaatgattcacgaaattaagtctggaaaacaagtagtggccaccatcacgcagcgccacgttgtagcatttcagtttaacatccccggcaccaacgatatgcagtctcttgacgtgccagtttgggctaacacgatcgccattgatgccgacggctcgatttgggcctacgagtcgaccgccgaggatgtttgcatcccggactactcgcgcaaagcctgggtggattgtgggccttccgaaaacaagatgcggtcagtaggggagatggatcgcttccatgattgggcagaatcgaagattgaccttcgcggcctgaaatagcacgcattgctaaacgcccggtcaagggatcgggcataatcatcacgaagtctattaacaaaccgattatgcaaggagacagaagaatgcaacaatttgaatctcgcggcaagacatacaacctgccggacactgctacccatgccgcccctggtgcgtgcggcggcctgtattttaaggatggcgatagttggtttttcatgggggatgtggttgggggtgtaccgacgaagacaggcagcttactcgtgggcttctacgatcacgacttggtggagttgaagccaaagcgcgtaccgttcgctttctggaaaaaaatcaaaggggcgatctttaaatgaatcaattcgaattcctggcgcgtgcgcaccgtgcgcttgcaatgtacgccttcagcaagaacatgaagattatcagtgttgaggttgagttcaacaatatcagcatttccggctacgttggcgactcataccacgtgacgaaattcagcttcccatcgctggcttgcctggagcgtgaggcattcggtttctgaatagcactttttgctaaatgcccggtcagcagatcgggcataatggccacacaccaaacaacggagattcaccatgattcgcactaccagaccactacccaataacctttacgccacgattggggttcgcgcggtgagacttattcacatcaacgaagttggcaacgtggctattttgtggtttaagcgccactcaagcggtgttggcctgagcattcaaagattcgggcgctttaacggcaactcccaaacccattctcattgggttgatggctcatactgctggacgcacgttaagcacgtcgagaacttcgacgccaaatcactgagcgacgacgacgcctggaagatggtaacagacctcttcggttatgatgcctgcatggaggtagttggatgatacgtttatcagacttcgatcgccactgcttaaccgggcaatttggcgaaaagccagtaatgtgcaagatctcgaaggtaaaaggcgaccccgtcgagcaggtcaatacgcttaaaggcctggcaatgcgcaaccgactttacatccatgtgcgcggcagactgttcgcacagcaggttcatttttcgcatgggacgtggttctacactggcggggacggggttggcccatcgcagaaaagggttatgctgcgcgagataatcgaacacggttacgtttggactaacgggatctactaatggaaacggtaaaagtaatttgcacgcacgctggctattcgccgctatccacctatttcacgcctggccgcgagtatgacgccatgttcggccccggccttgatgaagtgtggattttgcaggacgaccagaacaccacggaagacgaagaattttggccagcctgccgcatgccggacgaaaagatcgccatgtacgccaataggccatacgaaaacaacgttttgtttgaggtgaaagtatgaaagtaagcaaaaagaaactcgcgctgtattgggccttcttcctggctggccttgccctgcataacagcgtgggctggcagacgatcggaatgctgtgcatgattattggtgtatgccgactgtctgagattaacgggttccgccgtggatatcgggcagcattcagcggcgaaaaagaatagcactttttgttaaaactgccgtaacgtcatttgataaagtggcgttactgaagtgaaacaatccaatcaggagcaacgcaatgaacgataatttaatcgcactgctggaagaactgaattcctacggctgtgcatacatcgagctttctagcgaacacgttatcgaagtcattattgacgatgacgcagggttcaccaagttaagggtggctaccggggccgaagaggaattcgaagactgcggcatccgtgaagtaaccaaccttctcgaagttcaccaggtgaaggagatccgctaatgaaaaccgtcaaactaatggttgtcaatgcggcccgcgaacgtgaacgccaccttatcggctgcgtattcgatgccgtcgaggtaaaagactcaaaaggagactttcacgtaatacagggcggataccttaacgaatttatcgtcaatccgctggatactgacgaagatttgaccatccgtgttggtagcgagccggaaaacgcgcttttccacctgcgtaaagtatcgaaggcatcgcagcgcaagttgctggttcgcgcactgaagcgcatagcgaagcagcgcggctacaccgatgcatacatccgcaagttcggcacgttcgctggagtaggtgattgggcgcggtcatgggccgacttttatttcaacaaatccggcgaattttgttcagcgcatacggactggctgcatggcacggaacacgatccagttaacggccacgagtggtacgaattcattgaggcggaattagacgccctttgatagcacgaattgctaaaacgaacgtccggggatggtgcatactatccccacactaacgaacaaaggaaattacccatgaacaaaccaaaaatcatcctgatcccgtccgtcgattccgtggttaatacttatgctaaattcaccaaaggcaagcgctataccgcaaccgcatttaccaaatgttccggcgaaatgctgtacaaggtcagcgatgactacgggcgcgagtatcacgtaaacccaagatcttcgcactatcttggtggccatcgcttcgatattgagtacccgatcgaagattgcagtaagcgcgactcgttcacctacgatgacagccgttctatcgccattcgcgctgcaaccatcggggacgggtttattagccgggcctgcatcgttgatctgatcccgtccgataatcacgccaaagacgacgccgacacgctgttaaatgccgtcgttcgcgccggaatcggcttggagttaagtgatgcgtcgtgcgaatcattcatgcgtgaaccgttctcacgaatcgcggagcttgaaaagcaagttgcgttcctgactggtgaacttcaggccgcaaacagcaagatcgagaatgttcgcaaaatcatgcgtagcaagcctggccatgacattgaagattacgcgcgggttttgcgcatgatggccgacgcattcgccaaactttagcagtagcacgaattgctaaaacagatcaggggtaagctggtatagttaccccatcgaaacgaaacggagttacagcaatgaaaatcaaaataaccaaaatcaacactcttaatggcgacggctcaattaccctggaagaatgcggcctcaaaatcggcgaagttcttgaggtcgacggccacttcaacgacggctcctactgtgtgattgctccgcgcaatagcgagtttatccaggctggtgacaatatcagcgtgagcgaagatgaatgcgaggttgtggaagaatgagcaacaaaatttgggttctaacctacaccattggaaccaacgaggggcgcaaatcgcgccgcctcatctgcgacaccaaagagcgggcgattaggcagcaaaccgttcttggtggcgaggttgtcgagtatctccgcaagcctgaagcgttcaaggtgaactggccggaaggcatggatatcaacggcgctttagcgagcctgcgtgagatgcagcacaacccgaagacgtggagcgaccttcaatgcctgcgggcagagccggaagtgaaggccgacccgttcaccaatattcgggcgcagcacgcggaatggtcggatcgccagttcggtaacgttgggccagttgggccgctcaagcacctggcgaaagaggcgatcgaggccgccgaagcgccggatgacattagcgagttcgccgatatcatcatgttggtatgggacgcaacgcgccgcgccggattcagtgatgagcagttggctgaagcggtggcggaaaagctggaacggaacaagcgccgggcgtggggcgaggtcaaagatggcgagccttgccaccacgtaaaaaattaacgaaatcgaatgccgtttaaagcgcctgtaagccattctggctggcgcaaatttaaggagtacgattgtatgcctgaatactcaaaagtcgaagatatgccgattggcgcaacgattacgggtatccgtatgagtgagtcggtcgacacaatcgagccgctggcgttcccggttacgcaggtggagacggacagcagaaaagggttcatcttcatctacaaaaatttcaatagtccgctgcgtgttgaagtgttcattgctcgcggaacctgggtagaatgggagaaggacaaatgttcggactgaatgaagcgcagtacaacgctgtgaagcgcatagcaaagcagatggccgcagaaacaaaagacgccatcaagaaggacaagaagacctacgatcaggtcgccgcgaagatgatcgataaacattgggcgcaaatcaacacgctggttactcgcggccagtttatctggatagctggctacctggaaggccgattcggtcgcagggatggcgagtatgaataaaaaacaggcaaacgaatcagcgacctattgacgtcctcgcgctgaccgggtaacttgaaccacgtagacacaagaggcggtaaacatccgcaagtctggccccgctttggggcatttacaaaaggggttgtgatgcagtacaagatcatgctcacagcaagaaaaatgggcggcttttgcaagtcctgcattcaagagtttagcatgacgattgaggcgaacgacaccgccgacgcggtggagaaagcaaaaaagcaatccggcgttaatctggatacgcataaaatcaacataaactacataagggaagtcaatcaatgttaactctgattattgcactgttaatgctgttcataggctatcatgttggcgcggctcatcttgtcgagcgcctttctaagcgggtacatgaaggcacgtttgctgccatgatgtacaataagaaaactgcacgttgggaaaaaattggcgatccggatggtatcgcaaagcgcataacgttttcgccgcttccgtatgttgactgcgagcctttcgtgaaactacagaagacgcttaatcggcgaaacaaactgatatgatacaacgacccgcttcggcgggtttttttatgcctgcaatctggtatactcgcaactcaacaaagaaggagggctaaaa

SEQ ID NO: 238 - DNA, 49453 bp, synthetic construct; identical to SEQ ID NO: 237
  source 1..49453: mol_type = other DNA

SEQ ID NO: 239 - DNA, 49441 bp, synthetic construct
  source 1..49441: mol_type = other DNA
tgtatgcaccatgcacgcaatttgccgatcgaagccagcaaaagcgccaggtgtttttcgccaacatttacgtcgtgtggaaatgtgggggaggaataatcttacctaaaaattgcgcaaaaagtgaccaacataagcctataatagatatataagtatatgataaataataatattattattattactctttatctatatatatgtttggtaagatttcttcggggaggttatggattcctcttgcgcaagccatagtttttagatgttccgccgcgaaaaaatgtatatagggatatataggggatgacagcaaatcttaccaaacacgcttaaacccttttacggcaaggcttgcgggtggtaagatgacattcccacacaagcaaaaacgacgtaaatgttggagaaaaacacatgcaatataaaggctatgagttcgaagaagtcgacgtgtccgagtggatgcagtacgacgcagataagcaggcagcttaccatgaatggctgcaatccatcacgtttggcggctcaccaggggtagacgatcggccagttgctgaaaagtcacccgccgcattcactggtaatcgttcgtccgagatccggcgcatgttcctggatggcgggcgacgtatccagatgacggcggaggagttcgcggataagttcggcgttcatccggtcgacaaccatttccgcaggccgttgctgaaactcctggagccgggagaagtgttgcgggtgagcctgggggcggggttgatctccgtctttaccgagttcgacgcaatgactggctcaaacatggaggctgaggcatacaggcggcagggcgctatctccgagagggaaaggattaagggtttagtggccgctcttgctgtagactttgccggacatgccctggccgggatttacaaggcgaacttgttcgcggctatcgatcttggattgaccgccagcgatatcagccaggaagcggccaccacgcaatagcactttttgttaaaacccggtcagagcgatcgggtattgtctttccatcgacaacgaaccgaggaaaacgaaatggtcactcttatcacatgggaacacgaaaacagcgagccagtggtgcgcgaattcgagaccgtagcggcatgttacaacctggcggcaaatggtggcttttacaaggcgcagatcgttaacgagttcggggttgttgattatgaattttaaggcgagcgacgtaaaacctggcgtggtctacggatcgcgcctcaataaccgcctttggcggtgggacggcgaaactatgtggactaaaggcgagggcgatgttatctggcatgaatgcggctggccataccccaccatgagccgcctcgatatcgcttattatctttcggttggcgatatgcacgagatggaagatagcactttttgctaaaacactgctgtcgagatccggtattatttattcatcgacaacaaagaggagatgaaaatgagcaagaagaatccatattcaaccagcaactaccataacgaacacgtcatgcgctggcactggcagaaactcaaagaacgccaccttgcacgccatggcaaataatcacaatagcgccgcttcggtggcgctgtatcccaaccataaaaacggcttacaccaggaggattggccatgccacgattttcagcaacaacaaaacttcgcaccttcgccgggatgccgatcccatactcatcaaccaaagccgtccagggcagcgagcacggcgtatacttccactggtgcggcaagtggcgcttcaccgtcattcgcggcttttacgtgacctgcgaccacgtggatattaccgactattccggcggaaaccaggttcatgagttcaataggcacgaatagcactttttgctaaaactcgatcggggcaatgcgttattattaccccatcgaaacagaggagcaaaaaacatgattggcaaccacaacaacgaactgaacgcagcagcccaccgtcgcgccgtcgagcagaacttcaacgcgcttaaagtagcctgcgatgagatgaaagcaatgcttgaactgccgtcatgggatccccaactcgaagactattacgacggcctccgcgtcaagcgtgacgatatcatcaaccgcctgcgcctggctggaatgtttctgtaaggagaacgcaatgattcacgaaattaagtctggaaaacaagtagtggccaccatcacgcagcgccacgttgtagcatttcagtttaacatccccggcaccaacgatatgcagtctcttgacgtgccagtttgggctaacacgatcgccattgatgccgacggctcgatttgggcctacgagtcgaccgccgaggatgtttgcatcccggactactcgcgcaaagcctgggtggattgtgggccttccgaaaacaagatgcggtcagtaggggagatggatcgcttccatgattgggcagaatcgaagattgaccttcgcggcctgaaatagcacgcattgctaaacgcccggtcaagggatcgggcataatcatcacgaagtctattaacaaaccgattatgcaaggagacagaagaatgcaacaatttgaatctcgcggcaagacatacaacctgccggacactgctacccatgccgcccctggtgcgtgcggcggcctgtattttaaggatggcgatagttggtttttcatgggggatgtggttgggggtgtaccgacgaagacaggcagcttactcgtgggcttctacgatcacgacttggtggagttgaagccaaagcgcgtaccgttcgctttctggaaaaaaatcaaaggggcgatctttaaatgaatcaattcgaattcctggcgcgtgcgcaccgtgcgcttgcaatgtacgccttcagcaagaacatgaagattatcagtgttgaggttgagttcaacaatatcagcatttccggctacgttggcgactcataccacgtgacgaaattcagcttcccatcgctggcttgcctggagcgtgaggcattcggtttctgaatagcactttttgctaaatgcccggtcagcagatcgggcataatggccacacaccaaacaacggagattcaccatgattcgcactaccagaccactacccaataacctttacgccacgattggggttcgcgcggtgagacttattcacatcaacgaagttggcaacgtggctattttgtggtttaagcgccactcaagcggtgttggcctgagcattcaaagattcgggcgctttaacggcaactcccaaacccattctcattgggttgatggctcatactgctggacgcacgttaagcacgtcgagaacttcgacgccaaatcactgagcgacgacgacgcctggaagatggtaacagacctcttcggttatgatgcctgcatggaggtagttggatgatacgtttatcagacttcgatcgccactgcttaaccgggcaatttggcgaaaagccagtaatgtgcaagatctcgaaggtaaaaggcgaccccgtcgagcaggtcaatacgcttaaaggcctggcaatgcgcaaccgactttacatccatgtgcgcggcagactgttcgcacagcaggttcatttttcgcatgggacgtggttctacactggcggggacggggttggcccatcgcagaaaagggttatgctgcgcgagataatcgaacacggttacgtttggactaacgggatctactaatggaaacggtaaaagtaatttgcacgcacgctggctattcgccgctatccacctatttcacgcctggccgcgagtatgacgccatgttcggccccggccttgatgaagtgtggattttgcaggacgaccagaacaccacggaagacgaagaattttggccagcctgccgcatgccggacgaaaagatcgccatgtacgccaataggccatacgaaaacaacgttttgtttgaggtgaaagtatgaaagtaagcaaaaagaaactcgcgctgtattgggccttcttcctggctggccttgccctgcataacagcgtgggctggcagacgatcggaatgctgtgcatgattattggtgtatgccgactgtctgagattaacgggttccgccgtggatatcgggcagcattcagcggcgaaaaagaatagcactttttgttaaaactgccgtaacgtcatttgataaagtggcgttactgaagtgaaacaatccaatcaggagcaacgcaatgaacgataatttaatcgcactgctggaagaactgaattcctacggctgtgcatacatcgagctttctagcgaacacgttatcgaagtcattattgacgatgacgcagggttcaccaagttaagggtggctaccggggccgaagaggaattcgaagactgcggcatccgtgaagtaaccaaccttctcgaagttcaccaggtgaaggagatccgctaatgaaaaccgtcaaactaatggttgtcaatgcggcccgcgaacgtgaacgccaccttatcggctgcgtattcgatgccgtcgaggtaaaagactcaaaaggagactttcacgtaatacagggcggataccttaacgaatttatcgtcaatccgctggatactgacgaagatttgaccatccgtgttggtagcgagccggaaaacgcgcttttccacctgcgtaaagtatcgaaggcatcgcagcgcaagttgctggttcgcgcactgaagcgcatagcgaagcagcgcggctacaccgatgcatacatccgcaagttcggcacgttcgctggagtaggtgattgggcgcggtcatgggccgacttttatttcaacaaatccggcgaattttgttcagcgcatacggactggctgcatggcacggaacacgatccagttaacggccacgagtggtacgaattcattgaggcggaattagacgccctttgatagcacgaattgctaaaacgaacgtccggggatggtgcatactatccccacactaacgaacaaaggaaattacccatgaacaaaccaaaaatcatcctgatcccgtccgtcgattccgtggttaatacttatgctaaattcaccaaaggcaagcgctataccgcaaccgcatttaccaaatgttccggcgaaatgctgtacaaggtcagcgatgactacgggcgcgagtatcacgtaaacccaagatcttcgcactatcttggtggccatcgcttcgatattgagtacccgatcgaagattgcagtaagcgcgactcgttcacctacgatgacagccgttctatcgccattcgcgctgcaaccatcggggacgggtttattagccgggcctgcatcgttgatctgatcccgtccgataatcacgccaaagacgacgccgacacgctgttaaatgccgtcgttcgcgccggaatcggcttggagttaagtgatgcgtcgtgcgaatcattcatgcgtgaaccgttctcacgaatcgcggagcttgaaaagcaagttgcgttcctgactggtgaacttcaggccgcaaacagcaagatcgagaatgttcgcaaaatcatgcgtagcaagcctggccatgacattgaagattacgcgcgggttttgcgcatgatggccgacgcattcgccaaactttagcagtagcacgaattgctaaaacagatcaggggtaagctggtatagttaccccatcgaaacgaaacggagttacagcaatgaaaatcaaaatcaccaaaatcaacactcttaacggcgacggctcaattaccctggaagaatgcggcctcaaaatcggcgaagttcttgaggtcgacggccacttcaacgacggctcatactgtgtgatcgctccgcgcaatagcgagtttatccaggctggtgacaatatcagcgtaagcgcagacgaatgcgaggttgtggaagaatgagcaacaaatttgggtactgacttacaccattggaaccaacgaggggcgcaaatcgcgccgcctcatctgcgacaccaaagagcgggcgattaggcagcaaaccgttcttggtggcgaacttgtcgagtatctccgcaagcctgaagcgttcaaggtgaactggccggaaggcatggatatcaacggcgctttagcgagcctgcgtgaattgcagaacaacccgaagacgtggagcgactttcaatgcctgcgggcggagccggaagtgaaggccgaccagttcaccaatgttcggtcgcagcacgcggagtggtcggatcgccagttcggcgacgttgggccagtcgggccgctcaaacacctggcgaaagaggcgatcgaggccgccgaagcgccggatgacattagcgagttcgctgatatcctcatgctggtatgggacgcaacgcgccgcgccggattcagcgatgagcagttggctgaagcggtggcggaaaagctggaacggaacaagcgccgggcgtggggcgaggtcaaagatggcgagccttgccaccacgtaaaaaattaacgaaatcgaatgccgtttaaagcgcctgtaagccattctggctggcgcaaatttaaggagtacgattgtatgcctgaatactcgaaagtcgaagatatgccgattggtgcaacaattactggtatccgcatgagcgagtcggacgacgccatcaagccgctggcgttcccggttacgcaggtggagacggacagcagaaaagggttcatcttcatctacaaaaatttcaatagtccgctgcgggttgaagtattcatcgctcgcggaacctgggtagaatgggagaaggccaaatgttcggactgaatgaagcgcagtacaacgccgtaaagcgcatagcaaagcagatggccgcagaaacaaaagacgccatcaagaaggacaagaagacctacgatcaggtcgccgcgaagatgatcgataaacattgggcgcaaatcaacacgctggttactcgcggccagtttatatggatagctggctacctggaaggccgattcggtcgaagggatggcgagtatgaataaaaaacagccaaacgattcagtgacctattgacgcaatcgcgctgatcgggtaacgtgaaccatgtagacacaagaggcggtaaacatccgcaagcctggccccggttaggggcgtttacataggagttatgatgcaatataaaatcatgctcacagcaagaaaaatgggtggcttttgcaaatcctgcattcaagagttcagcatgactattgaggcgaacgacaccgccgacgcggtagagaaagcaaaaaagcaatccggcgtaaatctggatacgcataaaatcaacatcaactacataagggaaatcagatgatgctaactgtgattattgctcttttaatgctttttataggttatcacgtcggagcggctcaccttgtagagcgactttcaaagcgggtacatgaaggcacctttgctgccatgatgtacaataagaaaacggcacgttgggaaaaaattggcgatccggatggtatcgcaaaacgaattgctttttcgccgcttccgtatgttgactgtgagctatttgtgaaactacagaagacgctgaatcggcgaaacaaactgatatgacaaaagaacccgcttcggcgggtttttttatgcccgcgatctgatatactcgcaaatcaacacagaaggaggattacaaatgtctgaagaacgtagaaaacgcgtaacgaaatcgcactttgcaggcaactttaaagcgctatatgaaaaggagttcggcgtggtgctagggcgcacggcagagatgacgccggaacaattttttgatatcgcaaagcgttacttccagtgggccgaagataacgcaatcaaggctgcggagacggcaacgtttcagggcgacgttaacgagtggggagtgaacaagcctcgaatttttacgctaacagggttaagcctgttttgcggcgtgaaccagtcaacgcttacacgctatcgccacgatcctaactatgctcccgtcatggagttcatcgactccgtgatctatgagcagaaatttcagcttgctgccgtcggcatgattaacgcttctttcgtcggaaaagagatggggatcgataagccaccagtgctgaacatcgacgctatcgccggggataagaacgagatcaccgaagagaggttagagaaggcagtgaccaatattcttgataagctgtaagggtcagatatgaacgaaatgatcatttgggaagacctgtcgccagccgataagctggcaattaaggcgcttagtacgcgcaacttttcgctattcatgaagatctggtttcagatcatccagggagaaaagctgatgtggaactggcatcactcctacttttgccacacggttgatgaaattatcgccgggaagcgcaagagcacgatcgttaacgttgcgccaggctccacaaagacggaggcgttctcaatccacctcgcgccgtatgcgtatcttaaatgccggaaggttcgaaaccttcagatctcgcagggtgacgcgctgtcaaaaggcaactccgatcgcgtgattaagatcttctcatctaacgagtggcaggagctatggccatcaaagttcgggcgcaagcagatcgatgaatttcaggtcatggacgataacgaccgcgtaaggctggaaatggtctcccgttcgtccggcggtcagatcgtcggtaagcgtggcgggtacatgacgccaggtttcagcggccttatcgcgctggatgatatcgacaaaccggatgatatgttctcgaaggtgaagcgtgagaaaaaccacgtactcctgaagaacaccattcgatcccgtcgagcgaagaagaagaaaggagacgaaacgccgatcctttccgtgcagcagcgattgcacgcgcaggattccacctggttcatgatgagcggcggcatggccatcgacttcgatcggattgttatcccggcgatggtaacgcgggaatatggcgaatcactccctgactggttgcgacctgagttcgagcgcgacgtgctttccggcccgtcggtggtaattgacggcgtggaatactggtcattttgggaggaaaacgaatcgatcgagaacctggttgcgctacgcgaagccgatctttatacgttcctttcgcagtatcagcaggaaccgatcgccctgggtggcaacgtgttcaagtcggagtggtggcgctattacggcgattccgacaaggcgcacgagccgcgcccggacaagttcgaatatacgttcatcacggcggacaccgcgcagaaggtcaaggagctaaacgactactctgtaatgtgctattggggcaagtatcgggatcgcgtctacttcattgacggaattcgcggaaaatgggaagcgccagatctccgcgttcaggccgaagcattcatcaagcagtgctggcgtcggaacaaggagtgcggaaaccttcgccggatctacatcgaagacaaggcgagcggtacaggtctaatccaggatttaacgaaggcggtaaacggcatgggcgagatcgtcccggtgcagcgcgataaagataaggtcactcgcgctatggatgcacaaccaatcatcaagggtgggcgtgtcgtgctgccggacaatcacccattcgttgcagagcttgaggcggagatgagcgcgtttacatatgacgattctcatccacacgatgatatttgcgacaacgtgtttgacgccgcaaacctggaaatgaacctgagcgacgatccggtagagcgaatgaaacgccttgcgggattgaaaaagctgggtcgctaatacataatgtgggcctgacggcccacacttaaacaaggttgaaatatgaataacattaagatggacgactataatcaaatctttaatggtggcgctggttatgcgtcaaccctcgcgtctatcgcggcaagatttggaacaatgtcgcaggttgaagagttctatcatgaaaacggcatggcgaagaaaatcgttgacgtgatcccggaagagatggtcgctcccggcttccagctaaacggcatttcagataacaccaagtttcaatctgaatgggacgggttaaatctggagccgcaaatcaccgatgctctttgctgggctaggctgtatggtggctcctacgtcctggcgatggttaacgatggtcgcgcattgacttcggcagcgaagcggggtaagccactcgaatctatcgttgtttacgaccatgattccgtttccgtcgcagaggaggaaaccagtccgcgaagcccacgattcggaaagcctaaaatgtacgaggtgaagccgctaaacggcgggcaaccgttcaaggtgcattatacccgtatgcactacatcgacggcgagcgcgtaaccaacaaggtgcgcaagctaaataatggcgctggtggctcggtgctgaacaagtcgattattgaagcgattcttgattacgactattcggaatatctggcgacgcaactactgaagcgcaagcagcagggcgtttggaaggcgaaaggcctggcgctaatctgcgacgacaaagaaggcgagtacgccgcccggttgcgcatggcgcaggttgatgctaattccggcgtcggaaacacgatcggtattgatgcggacgacgaagagtacaccgttatcaactccgatatttcaggcatcccggaattcctttccgcgaaaatggatcggattgtcgccctgtcaggcattcacgagatcgtgctaaaaaacaaaaacactggtggcgtaagtgcaagccagaacacggcgctacagacgttctacaaactggttgaccgcaagcgcaatgacgattacaagccgctgttagaattcctgttacagttcatcgtaacggaggatgaatacagcgtcgagttcgaaccgttgtcgctgcctaccgatgcggagaaagcggatatcttccagaagaacgccaacgcggctcgcagcctcgttaccgaccaggttattgacgccaacgaagcgcgtgatactctgtcggcgttgattcctgaactgaagctaaaaggcaacgctccgaagcagaaaaaacttccggatcgcgccgctggttcaggcagcacgcaaagcgcagagatcttaaacaacacggaggcggatgatgaaagttaacggcagaatcccaaactggcgttatcctgaagcaagcgagcgggagttatcccgctcaatgcaggacgcggtgacagaactcgtggtagaaatgcgggatcgcttagaccgccttaaatttgacgccacggctgaggaaatcagccaggcggaagacgatatcagcgaatctgccatcgtgttcttttccgccgtaattgcggcgctttcctccattgggttgactatctatagattcaattctaaacagtggcttgcaattgcgatcgcggctggcgggcggaacaacgaatcagttatgcgccttaaagaattcggtgctggtgggtatgaagactggtatcaggaatcgctaaataagtggcaggattacgccgaagcgtcaatcaggaagttagcaagcgatatagttgctgactggacaacgaaagttagaaccgccaacaacattggcaagtctcgcaagcagatcgatgaaatcatcgaaggtcgatacgctatctatggtagttggtcgcgcaaccgggcaagcggaatcatcggaacttttaacagtatgttgatgatgcagcgcctaaaagatgctaaagtatcgcattacttttggttcgggatgatggacgaccgcgagcgcgagagccatatcaagctagaaggtaagcgacgccccgttaatggtgacggaatcttccccggcgaagaatacggttgcaggtgctgggcggttccgtcatttgataatgaggatgattgatggttaactttaatgattactttaatcacgtaggaaaggatctgatatggaagcgagcaacatcaaaccgcgtaaaagttggtgatgttgccgggtggaaagatgagcatgggtatgtatacattagattcatgggcaaactgcgacaagctcaccggatcatttgggaaatgcaccacggcccaataccagaaggaatggaaatcgatcatattaaccatgtaacggacgataacaggatcgagaatttaaggcttgtaaccagaaaggaaaactgtaaaaacgtatcaatgagcgtaacaaataagagtggagttgtaggcgtgagttggtgcaagagaacaggtaaatggtttgcatccataagggttgataaaaaagagcgattcttaggtagatacgaagacaaaaacgaagccatttcagcaagaaaggcggcagaggcaaaatacaatttccataaaaatcacggagataaaaaatgaaaagagttcaaaggttcgacacggtaaagatgaaggccagattcgatgagaacggctttctggttgatactccgatcgtggcgcgtatcggtgcgcagacgtaccagacgccaaccgggcagcgcgtcgagttccgcccgcgttcggaggtgttcgatgctgaatcgctggcttcataccagggcaagccgatcactttgggtcacaagatggtgaacgcgcagaacgcaaaaggccttgtcgttggctcgtgctccggcgctggcaaagaagatgggattggtgttcttgttccggtgatgatttacgacggcgagtcaatcgagcaagccaaaaagcgcgtagctgctgagttatcagtgggctacacttcggtcgatatcgatcgcaaaggttggggtaataacgcaactggcgaatattatttcgatgaagaccttccggaaaacttcgaagagatgaaaaatgattccgtctctgattgggttcgctttgatgcagtgcagacgaagattcgcgtgaaccacgtagcgctcgttttccgtgggcgtgccgggattgcgaaattaaatcttgatagcgaacaagaattcccctatgatgacgactcaaaccacaaaggagctaaaacaatgatcattaaaattgacggcgtagatgttgaagtagcagataacgttggcgcttacattgcaaaactcgacgcgcaagttgcatcggcaaccagtcaggtaacgagcatcaccgcagagcgtgacgcacttcagaccaaagttgatggcattgaagatgaagtcgccgcccgcgttgctaaaatcaaagccgacgaagacgcaaagcagaaagttatcgcggttgtttctgccgctggcgtcaagtgtgacggcctggatgttaaggcaatgaaagttgcttacatcaaagaggttgacggtcgtgatctgtctgataaagaagattcgtacatcgacgcttcttttgactttatcgccaactctgataagatggctggcaatcgctccaaagtcttcggcaaaaaagaagatggcgagcaaaaagacaaaggcggcttaccgaaacttgacggcaccgaaatcatcgatccgcaggcaaaattccgccgctaataatttgcggccttcgggccgctaccagaccaaataaacaggagattcaaaatggcacagattccagcttcttattcccgcaagcgtgatattgccgtagcggggcagatcgctgatacgtcgctttataatatcgacggcacttgcgttgctgaaggcgatatcaaggctggcgtactggtggcttccactggcgtagtttccaatggccataaggtcgttaagccagcgaaagcagcgagcgacgtcattgtaggcatcgcgcagttctcgcaagcctactcgcctgaaggcaagtatgacgatgagagcgcggttaacgttatgactcatggccgcatttgggcgatcgcggacgcaactgttactgaagcagattgcgtgtttgattctttcgccacctttaccgcaaacggcaccgtagcgaagggtgatgccggggttatcaaaactggctacaaacacactggcgaatacaccaagaacgcagatggcaccgttctggtgaaagtgcaggtgcttcagggcgccgttgctccagcggctgcaactggcggcgctggcgtataaaataaggggcttcggccccatttttgcaccagaaaaaaacctttgacggcttaacgattcgtgatattcttcatctcgttaagccaaatacacaaacaggagtttttcagatgactatgaaattagatgcattcgaacagagtgcaattaaggtcgcaatgcagggcatgggcgtcgatgccgcaaaactggatgcttacggtatctggactgttaagcagatgactcaattactgaatcgccagtatgagcaggcatacccgcagaccagcgcacttgagcttttcccggtaactaccgagatctcgccgaccgcccgccgctttgagtggctcgaattcgacggcgtaacctctgcgaaaatcatcgccgattacaccgacgatctgccgaccgttgaagcgatggcaaaagagaagtcagggaaagttttccgcctgggtaacgcgtggtttatttccatcgacgaaattaaaactggtgcagcgctgggttcaagcctgagcgatcgaaaagcaaccctggcccgcgaaggtcatgagacgctcgtaaacgatctggtgttcaaaggctccactcctcacggtatcgtgagcattttcgaccagccgaacattaaccgcatgaccgccagtgctgcatggggcaatgattcagcggcggctgaaaaggcattcgaagatctggaagacctgcttaacatgatcgaagaaaccacgctgggccgccatcacgcgaccaacatcgtgattcctccgtctaagcgtcgtcttctgacgaaaaagatgccggacactagcggcgactcttatctgacttggttcaccaagaaccacccgaacatcaccattacggcgatggcggagttggaagatattgacggcgcaggcaccaaaggcgtgctggcatacgaaaaagacccaatgaacatgagcatcgagatccctgagcggttcaacatgctgccgatgcagccgaaagacctgcatttcaaagttccgtgcacctccaaatgcactggtctcatcgtgtaccgcccgctgactattgcgattctcaccgggatttaatcaaaagcgccttcgggcgcttttttattgcattgcattctgcaatgtgctttaatttgaaacctaaagtaaaccaatggagcattaacaatggccagtaaaaaagaaaccgtagaaaccgtagaaaccgcagaaatcaccagcgaagaacagacgccgcaggttgttcaactgcaaaacgttggtgcatgtgcaattcgctataaaggcacaaattacgtctatgagcaggttttcgaagtgccagaaagcgagatcgaccgattccgccacgaaatcttcaaaggccgcgtcgagttctacgacaatcctaaacgcacgcgcgaatacatcgcagcggtaaaggcgacagcgaaagagatcgtgcagcctaaaagcgcggaataacaaaaaccaacaaagggcgcttcggcgtcctttttcatatcaggagagcaaccatgaattacacaattcaagatgtgatcgataaaatgcgcagccttgcacctccgcttaaagaagttccagatgaactgctgtctgcatgggttgtgcttgccgaagaattcgtttgcaaatcccggttcggagactccatcgttacggcgatcgcgttgatgaccatgcatctaatgtttttggacggcgcaatgaagcaggaaggcgaaagcctggaatcttacacgcagcgagtggcgtcgttcaccctgaccggggagttttcccaaaccttcgatcgcgtgtcggcgtcaagtgataacgaaatgctttctacgccgtggggcaaaatgtactggcgtatgctcaagatgcgcggcggcggcttcggcctgcttaccgccgggaacgtgcgccgctgcggaatggttaggtgatcgctatgaactacaaagcaatccaggcacgcgcaagcgctggcattaaattcttcagcgacgctggcggcgtgttcaacaagtacacgaaaggcgctggcggaggaatcgatccggaaaccggggaagatatcattcctggcgaggtggtgacgacaatcaagggagcgatcagggatgttaatgaccgtgacattaacggcgaaaccatccttgctggcgataagcgcggttttttcactcatgatgtgccaatcatggaaggtgacgaaatcgaagtagacggagagcgctaccgcgtggttaatgcccgcccggtaaaaccaacgggaaccgtcgttgcctaccgtccagttttgcgcagggtggcgacttatggctaattacactatccgcgaattcacaggcgcaattgatgcgtggtgtaaggccgctggtgatgcgctggaggacgttgtaaggtttacgtgtgaagatattcaccgcgaccttgtaatgcgttctccggttgatacagggcgcttccgtggtaactggcaaatcacctttaaccgcgccccgctttacgcgattaacgcatacgaccaaactggcgaaaagacaatccagaacggcaaagccaacattgcactatacgcaaaaggggccgggatcacttcgatctggttcagtaacatgctaatctatgcgaacgcgctggaatacggccattcaaagcaggctcccaatggcgttatgggcgttgttgcgatccggttgggcgtttatgttactgaggcaatcaagcgagcgagggcgaaaaatgcattatgatatggcgttaaaatgcaaggcggcagtggctaaatttgccgccgagaacgggttgagggtcgcgggggataacgttgactttatcccaccgagaggcggggaaacctaccttaaagtctcctacgtcgaggcggattcaagatcggttgacctgtcaaggaaatgccgagtctatctggcgatggttcagattgacgttatctttaagcctggaatcggaaccgatcgagcgaggattatcgcccaacgcgttgcaaaatccttccctgaaggaaagattgttgatcgtgacggtaagttatatgtgagcgagtgggcggaggtacacggcgtgcagaagcacgaaacgggttggttcttcccggttcggttcacagtaagatgcgaccgcacggaggagagcggctatccatccaactagcggaacctcacgtcgcttataatttcttgccagcctggaaatatgtaggcataatggcggtgtaaaactttcattcaaacaggagtattcaacatgcatttaccaaacggtgctaaggtcttctttgagaaggctcgcggtgcgaagattccgtttaccgcaatgaccaacgacgcgaaaaacccaaaaatcacggtggcagatggcaagctgaaggtgaaagatattgtgatcttcaccgattgcacctgggacgacttcgttaacaaggtggctcgcgtaaaagcagtgacagcaggcgtggcaacgctggaagagttcgacacctccgacactaacaagtatcctggcggcgcggctactggtaacgtaagcgtgatcactgattgggtggaattgccttgcattcaggatttaggcaaagatggcaacgaacagcagttctataactatcagtgcttgagcgatgagcgcgaacaatccgaacctacttacaagtcggcagtgacgcttaactacacgtttgcgcacgattacagtaacgcgatctaccctgtgttgcgttcagccgacgccagcaagcaggcgagagcgatgtacatgtatatcccgcgagcttccgaggttcgttactggtctggaattgcatctttcgatgacattccttccacggctgttaacgagatggaaacggtaacgcttaacattgcgcttaaaggtgctcacgtcttccttccggttgccgtgtaattaaatggcggggcttgtgcctcgcctttttttgtgcataatagcgaataacacaaaccaatcaggagttaacaaaatggctaaattcaaaattcaaatcggcggcaatctcccttctttcaagctgcctgtaaccttcacttgccccgacggcaaagaagcaaccatcaccatgacagtaaaacatcgttcaaccgatgagatgaaagacttttatgagagcgaagataaagcgccaaagggtaacgccgagtttatccgcttcatggctgaaggttgggatctggatgacgaattcagcgatgaaaacatttcctggctttgcgctcacttcccggcgttcgtcatggcactgccacaaacttacatggccgcgctggcgggccaccgtgcaaaagtttaaggcgggctgtttatctcacgcttcagcctgagctaaccgatcgccagcttgcggagtacgggttaaggcgatcggattatgaagcagatcttgaaacgatctactttgatgaacagaccgcccaaagctggcagctattccaggccatgcaaacgcagtggcgaatcgggatgaatggcccgacggggcttgactataatacgttgcctatgctgttcgaattgtataaaatcgacaatcgagaagcggcattacttgacttgcaaatccttgagggtgaatacctgaaggagatttacaagaaatccaaataagcgcctactggcgcttttttcatatgggggcgaaacatggctgataaagtagctgggctaacgtttggcgttgacgtgtcgcaggttgataaagcggtacgatcactcgcagaactgaaaaaccaaagccagcaaacgggcgctggcctacagtcacttgctgacgctgaaaggcgggccacggcgcagaccgaggaaatgaaccgcgcattgcagcgccagaagcaagagactgacaaatcaaaaaccagctttagcaggatcgcaagcgccatcgatcccacgatcacaaaaatggccaacttgcgcaaagcgacggaagaacttgataaagcgtgggcgcttgggcttgttcctgacaaggaatttttccgcctgggagccatcattgaatccacaaccaacaatctacggcggcagcaggcggcgctaaccgaagaaggtcgcgcagcaatcgcagaggcggaggcaaagcagaaggcggcaaatgccgggcgtgattttgtcgccagcctgaaacagcaggctgactccatcggaaaaacacgcgccgaactgctggaaatgaaggcggcgcaattgggcgtatcggcagaagcggccccgttcattaacgcgctgaaacagcaagagcaggcgttaaagaaacagcaaaacgctatgggcctggctggcatttctgccgggcaatataaaatggccatgcgccagttaccgatgcagatcacggatattgtaacttcccttgcgtcaggtatgccagtctggctggttgcggtgcagcagggcgggcaaatcaaggacagcttcggaggcttgagcaatacgtttaaggtgttgttgagctacatcaacccgctaacggttggtgctgcgtcgttgggtatcgccctggcggcaatcgctaaagctggttatgactcctggagtgcgcaacgagaactggcgaatgcgctggtgctgactggtggctatgctgcgaccacaaccgggcagatcacagccttaaccgaagagattaacaaaaactcatcggccacgattggcagcattcaggaaatcgcaacatcgctcgccagttctggtaagtacaccatcaaccagattaagcagatcacgaagactacggcggaatggtcggcgcagacgggggagagcgagaagacgatcacagggtattttgatgccatcgtaaaagaccctgttaaggggcttgccgatctcaatgagcgttttaattttctgaaagagggccagctaacctacatcgaatctttgcgtaaaacaaaaggcgagacggcagcagcagatgcggcgacaaaactgtttgctgatactatggataagcgccttaaagatatcgcggacagtgcaacgccactcgaaacgatgtggatggatattaaaaaatgggcggctgactcgtggaagtgggtaggcgatcacacggtaggggcgctaaaccttatcgttgacacggtttccgcaatcatcaacacgatcagaaagctgattgccgacggcgacgccatgatcgcgcagttcatcgttgacgctggccgacagctacagaagatccccggcatgggagactttgggaatgactttctggcgcagcaggagcagttaatcaaggactcgaaagccaaatccgccgagcttgcaaaaaccattgcggaacagcaggcaaggatcgcaaaaggcgagatgggttacattgacgccgcgaaggataaaaccctttccggtgggtacagcagcaaaacgaaggatcgcgtaaatcaggaagaaaaagatatcctgaaaaaccgcaacgccaggaagcagcaggtagacgcgggcgttaaaattgatgagcagtatcaggctgaactgctatcgctacaggcgcagttaaaggttttgcagcagcacaaagggcttgatgacaagatcagccagcagcgcaaagactacttcgagacggttgctaaattccaggttttggaagaggcaagccagaagcgaaaactgacccaaagcgaacagcagatgctggcgaacaaaaagaatatcctgtacatggcggagcaaaaggccatcgtgggagatcagattgttcagcagcagagattgaacgccttgcttgacaagtcgaccaagtatcaaaaccagatggcggagaaaaccaaagcgctacaggataccgccggaatgggtagcaaggagcaggagagataccgggccaatgcgcaaatggcggctgactggaaaaacaacggcggatctttaagtgaccctggatttaaagcgatgcaggccgcaagcgataaattctacgcacagcaagatgcgcaaatgatgaactggaaggccgggttcactcatgcgtgggctgatattggcgacgaagttaatgacgtatacaccaacatcggggatatcactaaaaacacatttaacggcatggcgagcgtgctgactgattttgtaatgactggtaaagccagctttagcgactttgcaaagagcgtgatcactgacattaccaacatgcttatcaagatggcgctgtttaactcgctttctgccgcgtttggtggtggcggcacgttcagcttcgccaacatgttcagcaagggattttctggtggtggctacactggcgacggcgggaagtatgaaccaaaaggcgttgttcacggcggggaattcgtattcacgaaggaggctacgcaaaggttaggcccggaaaacctgtaccgactcatgcgcggctatgcaagtggcggcctggttggtggtaacgcaagttccggatctggaatcaccaacggcggcaacgtcgcagcgtcggcggctatggtgttcactatcggtgacattaacattacgatgggttccggtcaggatagtaaggggatggagcagggcgtaaggcagatcgtgaacgatatgttcaccgaggctttgagccaaaacgggcgcattgcgaagttcgtcaatgagaaaacgagggggtagtagtggattcctttaaatggtgtacacaaattcaaggaggggcggcaaaggtagccgtctccaacaacattcgatcgatcagtttcggaaacggctatatccaaacggcgtcgagcggcattaacaccaagcgccggacggttccgatcgtttatggcggttcagattgggaggaggtttataacttctgtcaggatcacgtaaccaagccgtttgtgtggaaggcacctgatggaagaatgggcgtattcgtcgtaactgccgactccgttaaccttgcgccgcatggtggcggcgtgtttgaggtaactgcggagttcgccgaacgcttcacttcagccggataatcaaaagcgccctttacgggtgcttttttttggcctatgatctggagtcaattagaggagggcttacgatgacagccaacatttcaaaagagtttacgaactgcttacaaaaacttttccccggcgagatcctgacgctgatcgatatcgacgccacaaagttcggcgggcaggtctaccgattccataacgagaacgtcgcctatacaaccgaggagcttttagcggcggtgaacggcgggacgcttcagccaaaaatgatcacgtttcgcggcgagcaatacggcccgcgcccgttcggcctgggcgggatcgcaatgtcgagcgatggcacagtggaaaagccaacgttgacggttagcaatattgatgcgcaggcgagtgctcttattcgcgcctacaacggcctcatgcaagccaaagttacggtatgggttttggtcaatgaattgctgcaaaacgacggcagtgttaaagagggcgattttaggcgatttgtttactacatcgagcgaccaaagcaagtagacccgcaaaaggcaacgttcgaattaacatccgtgtttgatatggacggattgatgatcccggcccgactgacgcaaaccgtttgctattgggcgcagcgcggctggtataaatccggcaagggctgcgactacaacgggcagaacggatacttcgacaagttaggaaacagggttgacgacccgtcgcgggatgtttgcggtggcctggtgtcttcttgcaggcttcgttttggcaatgaaccgttgagtttcggcggttgtgcgacagcaactttgaagagtggtagctaatatgttgactccgaaaattaaaatgcagatcatgcagcacgcgaaggaagtctacccgcacgaatgcgccgggctggtaacgcaaaaatcacgcgtgcaaaaatatcaccgactagacaatgtttctcaagatcctgagaacgaatcaatgccggacgaaacgcagtatgcgatggcgtcaatggagggggagccgatcgccttcgttcattcccatactggcgacggggcgaccacgattccgagtgccacagatttatgcttttgcgatgagtctggattgtcgtgggttatcgtctccatcccggaaggtgatatgcgaatcattgagccgaaacgccgacctctgattggtcgcccctgggctttgggcgcttacgattgctatggcctaatcatggattttcacaagcgccacggcgtcacgctaaaagatcggcgattgccgttcgaatggtggaagccggaatacaaagagaatctttaccaggattactggcaagaggacggattcattgaaaacactggcgagcctgaagttggcgatatgatcatcttccagattcaggcggaaaagtggaatcacgcgggtatttacgttggaaacaataacatccttcatcacgcgtttggcaagctgtctcgccgggatatctattctggatggtacgagcagcacaaggttttaatttgcaggcacaaggagcttaaacatggcatcacatacaaagacgattaaactttctggttcccttgggcgtaggttcggagtattccacaaacttgcggttgattcggttgctgaatgtatccgggcgctgtcttaccaggttgaggggtttaagcctttcatgcagagcaaggttggtttaaatatgcgcttcggcgttgtcgccgacggaaaaccaatcagcgcgaacgaccttgcgacttttgccgtggcgagggagattagaatcatcccgatcccaaaagccagaaagaacggcgggttgttgcaggtcgttatcggagcggcgattatggttgcggccttctttactggcggcggctcgctggcggctatgggcgctttttcgtcggcagcattcatggctggcggatcgatggttttaggtggcgtaatgcagatgatcgcaccgcagatgggcggcaacatgcgggcgagcgaatcgcctgagaataagccatcgtatgcgttcggcgggccgattaataccacggcggccgggtatccaatccagttgccatacggttacagattggctggaggcgcattgttcggttcgggatcttacgcagaagacaacaactaattaagccattcgctttttagcctgggggcgtagcctccgggctttttgtcgtgtacaattgcgatactattaacaggaggctaaacgatgactaatatcaaggcccgcaagggcggttcaagcaagccacgcactcccgtagaaatgccagataacctgatctcaaaagataagatcaagttattgcttgctgtttcggatggcgaggtggttaacgacttcagcctgaagcagttgcattttggaggcgtcccggttcagaacgaggatggaacattcaactatgagggcgtgattgcagagttccgccccggcacgcaaacgcaggactacattcagggcttcagcgaatcaagcgctgaattccaggttgctcgtgaagtcactcacaacacgccttatacgcttaccgtatcgaacaaaaatctttctgccattcgctttcgcctgttatggccgcgcgtgctgactcaaaaagataacggcgatatggtcggatcggttgttgagtacaagatcgagatggcggtagacggcgcaagttatcagacctacctaactggcaaaattgacggaaagaacacgactggcggttacgatcggagcattcgcgttaaccttccgcaaaacttcacgtcgcaggtgcttatccgtgttagccgagtaactccggacgctgacggggtgaaggttgtcgatgcgttccaggttcaatcatacgctgaggtcattgatgcaaaattccgctacccgttaacggccatgctttacgttgagttcgatagcgatctgttccagaaccagatcccaaccatctcactcaaaaagaaatggaaaattattcaggttccgagtaattacgatccgattaatcgcacatactccgggacgtgggacggtgtttttaagtgggcgtggagcaataacccggcatgggtgctttatgacctgatcatgaatcagcgctatggtttagaccagcgcgaacttggcatcccggttgacaagtggtcgctgtatgaggtggcgcaatactgtgatgaacttgttcctgataatcgcggcgggatggaaccgcgctatttgatggatgtaattgttcagtcgcaggttgaggcgttccagttggtaagggatatttgttccgcgttccgtggaatgacgttctacaacggtgaaagcctatcgattatcgtcgataagccgcgcgatccggtgtacctgtttacggctgataacgtcgttgacggcgttttcgttcggacgttcccaagcgaaaagacgatgtacacgtcgtgcaacgtcatgttcgacgacgaagaaaaccagtacgagcaggatgttgaaccagtattcaacccggacgcagccatgcggttcggacacaacccgaccagcattacagcgatcggatgcaccagaaggacggaggcgaaccgccgtgggcgttggattctgcaaacgaacctaagcgccacaaccgtttcgttttctactggtctggaaggtatgattccttcttgcggcgatgtgatttacgttgcagatccgcactggcaatctgcctttaacctggtgctttcagggcgaatcatggaagtatccggtacgcaggtatttttggcgttccgctgcgacgcgaaggctggcgacactctgatcctgaataccgacgacggcaagcctgtgcgccgcacaatcgccagcgtttcggcggacggtaagaccctcacgctaaacgttgggtataactttgacgttgcgccggacagtgtattcctgatcgagagcgatcagcttgcagcggaacagtatgtagtaacccggattgaaaagggtagtgatgacgacgaatttactttcgccatcacggctacgcagtacgatccgaacaagtatgacgcgatcgataacggggtaattaccgatggccgaccaacttcggttgtcgaccctgattcaatgggcgcaccgaaagacttaacgattagctctttctcccgcattgttcaggggatgagcgtcgagacgatggttatcggatggtctgccgtgcagtatgcaaaactgtacgaggtgcaatggcgcaaggacggtggtaactggaacaacgttccgcgcactgcgacaacgcaggttgatatcgaaggcatctatgctggcgagtatcaggcccgcgtgaggtgcattagcggtgggaatgtagcgtctccgtggtctgaattggcaaccgccacactgaccgggaaagtcggagcgccaaaaggcccgattaacctgtttgcgtcggacaatgagatcttcggcattcgagttaagtgggctatgccggaaggagcggaagacacggcatacattgagctttaccagtcgcaaagcggaaccgatcaggacgcaagcctgcttactctgattccttacccggcggctgaatactggcactcaattttgcccgctggctacgtgaacttctacaaagccagaagcgtagaccggatcggcaatgtttcagaatggactgattacgctcgcggcatgtcgtcgactgacgttaacatcatcacagatgcgatcctggatgaaatcctggatagcgacgcgatgaaggaactacaggaaaacgcacaggatagcgcggcaaaactcaatgactacgcgaacagcatcattcaaaatgcgctggcgaatgatgcggacgttaggaaaatgacgaaggagaacggtaagcgtaaggcagagatcgcgcataccacggtgctgattgccaacgaatcagaagcgagggcggctgaaattacgcaacttaaagcgcagattgatgaagatatcacgtcgcagattacgatccttaacgaagccctggcgacggaaagcgagacgagagcaacgcagattggtcagttgcaggcagattttgcggctgatattgacggcgtaaaaacaacaatgaacgctggttttacgcaggttaatcaggctattgcaaatgaaagtgacgcgcgtgcaagttccgaggcggcactagatgccaaaatcgggcagaactccgcagcgctaaaccagaaactcgactcgtgggcgaacgttaatggcgtcggttccatgtacacgatgaagttgggcttgaggtacaacggtcaggagtatagctccgggatggccctacagcttacctcaagtggtggaagcgttgtttcgcaggtgctgttcattgctgatagatttgctatcatccgtaatgcggcgtctggcgcgtacacgctaccgtttgttgtgcagaatgaccaagtgttcatgaataacgcgcttattcaggacggttcgattaccaacgcgaagatcggtaacgtcattcagtccaacaactttcaggagaatgttgcaggatggaggcttgataaaaacggcgtatttgtcaactatggctcaacttctggcgaaggttccatcaagcaaacgaaccagaacatcactgttcgagatggtagcgggcgcgttcgttgccagttgggtaggatcactggatcatggtaaaattaatgccgggagaaatcccggcttaaccaaaggaggcagacaatggcttatggttttcaatcatgggatgcgaacgggaaccccaacaactatgggatcgtccctgtttcagttgctggatatattgcattagcgcaaggccagaaaagcggaacgtggtattacaacgtcccgcctgggttgaggcttggtttcttttgggtcgcaaatcaagaccagtacggcacatcgaagaggcgaattaccgttagtggtaatcagatcgttgtttcagatgcgccagatgatgcgctggaatcaggcgtctacccggcgacgcaaggttttattgtcgttcaaattatgagttgatgattatggcagattacggaattttacttaccaatgatagcggcaatgtttgggtttcgcctcaaagcatcccactggcactactatcaaagcagagcatcactcttaggggtggtactaactccgatgaagtaagatcggtaacttacgacacgaatcacccatgcgttccgttcgtggtctttcatggatcttcgccacaaggtgcattcacaaaaatcaagtacagcggaaacacttgcagcgttgttttttcttttggtaagcaaaacgtatatgcggaggtttattttttctccgtgttcccacagccaaatcctggttatgggcttgcaatttgggatgaaaacggcacgctgattttgaccaatgaaaccagaacactttcagacgtacagacctacggcactggttttaatctaaacgtcactaacggcgggaagtgggcggttagtcctgttcagttaggcgcgatcgttggtgttgttcgcgatccctacccaagaccatttcagggcgactattgcgcagcggcattctttaacggctcaagcacgcaacttaccgcatatctaacgcaggcaccaggaggagccgccagcgatctaacctacgtcaatatgaaaaacacctgcatcgctattgattgcgcaagatacgactaaaagaaaggggccatacggcccctttttctaccccttgagatttttgatctcctcttttaattcatcaacttgagcagacagagctttgattgcgcaaattgcatccatcaaaagagcattattgtcaagcataagtttcttattttcaactacgttaccctcatcatcctgataggatgcgctgctttctttaacgtagcacgaatcgatatctcgcacctgctgtgcaataactcccctacgctcgcgtttcttaacatcatccttataggtgaacttgaccagattcattgctttgatgttttcgagtgactgcaaaccatcataagcaacaacattgtctttgtagttaatgtcagatagaccagcaaaaacaacgttgccataagcagtgcttgcaatattaccatctgatttaaactgccaatactgcgtattaccgccagttccccatttgctgacctcaataacggcacgatgttcataacccctatgttcctcaagccacatagcgcaacgcgcaccgttaccattaatgttgaaccgtgagataaatgatggagatttaaggatatcaccattattcccatttggatcgctagttggccacgctacaaaagcatcattaacggtactcctcacagtcccatatgacacaacacttccgcgaagatcggcagccccgccaactcgcaacgtgctcgacattgtaacagcgccgcgaagatcggcagccccgtcagcacgcaacgtgcttgacattgtaacagcattgctaaagtttgcattcaacccggtaacagcaaagttcgatgcatcaaaaacaacctgcttcgcgctgttcatatctccattagggcggaagtacattccttgaccattttcagggattgagtacacgatcgcattgctgttatttgccctaatagtgcaaccgttcagggtcagcgtggcgtttcctccaggaacgctaattgcctgcggctggctgaacgtgttagctacgttggtgcgcgggatcgtattatcattagccatcaaatagtcagacggtgaattatatacaattccagaaggctccgtgtcaatccaggtataaccagtgcgatcaatgattggccccgtaatcgaccctttgttagcctgtacgtttacatgattcaaccacagttcaggaacccatccgccgggagcatgaatataaacatcaaacgaggagtctgtgtttttcaccaccccaagattaatgcgtctggtgtcgtttggtctggcagcaatcagggtgcgctgagtaaaccaagtgtcaatattattactggttagcgtatcgggaagaccgcggccagaaatcgaaaagatatcaaccgggagatttgcagtgccataaccagtacctccgccaatgatgaactgagcaaatgcgtagccatcaccagcgttcttgacgttggcgatcttcatccacttctccccagcgaaagtgccagtaattttatccggcacctggacgccagccacaaggtcgacaacctgatcacgaagattttgcgtctgccccttcgcagtttgcgcgtcgttcttcgccgagttggccgcagtttctgacgcttttgcattggtctccgaggttttggctgcggtttctgatgcctttgcattggtctccgagtttttggccgcagtttctgacgctttggcgttggtctctgaggtcttcgctgcggtttctgatgcctttgcgttagtctccgacgtcttcgcagcattcttggatgcagcagcattggtctctgaagtctttgcagcggtttctgatgcctttgcattggtctccgaggttttggccttattctccgaagatttagcgttcgtctctgaggtcttcgctgcggtttctgacgctttggcgttggtctctgaagtttttgcagcgctttcagacgcagccgcagccgtagcgcttgcgcccgcagcttcggaatctgccctcacctgatcggcaagactttgcagagcttcgaaatcgaagttcttaaagaagtcgacagcatccgcaatttgagtttcctgtgactggtagtagcgcagagtttccgcaacatcttgcgccagtccgtcaacggtcagcgagtcacttaacaggatcgcgtaatcgctagacgctacgacagcgccttttgtggtgatggctttaatttcagtatcgctaaccaccttgtttacgacggccatttgaattggtgacgacaaaaacataatcgtcgcaccagggcgaatcagcgaaagcgatgattgccattttgtgccagtcccggtaacggttccgtctgcggccatagccgctttgccttctctgtatagtgccatgtttttaagcctcattggttgattgagtaacgcagataatagcatcaatgaaccgataaaaaaaggagcctttcggctcctttagttgtcaaattagaacgggatatcatcatcgaaatccatccccgcattcccgccgctgttttgcggcttaggcgcttgttgcggcttgggttgttgaggctggccccacccggattgctgattgccgccgccgctttgcgaaggatcgcgctggctgaattcgagttgcggcataatcatttcgttgtggctgtaaattgtgccgttgtgctcgcggttaacgatctgaagcgtccggcaggttacgctgatcaccttatccatttgcagcgcttcgtcgtaccacttaatcatgttttcttttgcaaagaaaactgcgcggtagttcgtgtaaattgtttcgtcctcgccatcacgattgcggatcttcatccgctccgacaggtctacggcgtacattttccacggcccgttattgttgctgccctctttgacataaggcgcttttcggattacccctgttacaacatgcattgtcattcctatggggcggcttcccgcccgttaaattagttgaaagatgaaatatcttgcgcttctggttcaggttttgattctaccttttccggctcgcgcttcgcaacctcttgcggtttaccggggttaaatccgtttgccggggtgactttcagttctgcctggcgtttggtgatatcgtcttccgtcattttccactccgccggggttaacgtttgtttcgccagcttatagatctcacgaagcgattcgagatcttcgcacgcgtcaatgcgttttttgaagtctttcggtgtcattttcgtaatttctgcatcatcatccgcctgcttgatacctagcgctgcggccagcgcataacggcgggcgtaagatgttgttgagccgtatgcttgttcgacggttttactgatcggcatattgtactgaaacgccatgaactcgccgctttcatgcaaaaacatagtttcgaggtgcatcaccttttcggtgctcgtatccatcatggattgaatgaccataattttgttcttctccagcgccggggaaatagcgtcgaggatatccccaagattcgcataggtgttcccaagatggttgttcttaccgcttttctttgcggccacgaagccagattttgccttgattaatgcggctgcgatggtggtaaatttttcagatgtacgcatgataaagtttccttttcctaattggtaatgcgcactatatcacaagtgcgcaccagtgtttagctatttgtgccgtatacgtccgggaacatgtatttcacaaactgaggagtcggcaaaacaacttccgccgcgtttgactcatatgatggccatgaatcgtgcttcacgcattcagcatactgatgaatcacgctttgatactgtttgcgaccgatctcgatctgctggctggtcagggtgaacgccagcggagcaaacggtgattttttctcctgcgttagcagtctgacaactaccgggcgtttttcgttgtaagtcttcacgaacagatcgcgctgcaatgccatcttgagatagtagcccaagttgaaggcgagtcgcccgaaatcgtcaggcttggaagattgcgtggttttgtagtcggtaatcaccacgacctcgaaaacctcatccgggttgaacccccactccttgatgagttcgggatcggaaacaacgtcaacatgatcgagtcgaaccttaaccttgacgccgaagatctcaccgaagattgacaattcacgctgtgctgtaggcgattcgatacatgcggcgtgtcgcgggttagccagcatcacgctgcgcatttgaacaacggcatcgaaatcaacatccttaaccagcttgcgcccggagtttatcgcggcgctttcgtcgcacagttcaatagcccaccaaacatttacgtcaatcccggcgcgatatgccatttccagaagttccgggtaatccttgttggacgtcccaatcaggccacacgctttcagcttcgcagacagtgccgacttcgacgtaatcagatctttaacctcgcccggagaagtcgcccgcaggtactcgccattaaactttgccgtctcaagcatacaggtatgcgaacaggttccgaacgccagcgcggctgcttcctcacgcactttgaatttccagtgcgccggggatgttgcgtaaatctcgccgaggcttgagccgctaacgtattccgcgcaccaggagttaggatcgtggtaatcatcgttggataattccgcgttggtgtatgccttaaaaattgcttcagccattggtatcactccatttgtggtttcgttgcgttaagtatacgcatgacgattccaggcgcaagtcaaaaagtgctatccgcagttggttaaaaaacgagcgaaatttacgtaagatttagtaagatgcatcttacgtgatttttcctatatatttcatttagttaatgcaaatcggtaagatggtaatatccctataggtaaatatccatgaaaaatatggcgcgaaatccagcgaaaaaagacacgcaccccggagaaatcttaccaagattgatagatacagatagagtaataataataatattgttatttatcatatacttactatctatatattgcggttaattggttaaattttgcgcgaaatttacgtaagattcatcttactaaatcttacctaaagtggttcgaccagctgcaagccactgaatttcaggcataaaaaaaggtaagactgatttgctcaatcttacctaaattctggtcaacatttaatcatagaagcgacgatgccctgtacaacttgcgttcaaatccgagcttaaagttgtcaccgttcggaacgataactttaagatcccgatcgtcagcagccgccagcatatcccgatctccacgacggcaaactacccgcatttctcgcttaccttctccgccattgcctttatacctgtacgccacgatctcgacgtttgaaggtatgatgcaggcccaaacgtcgcacttgaacgaactggcaatattaaagtgcatcgcctcaatccaggatcgagcaaggtaaatcggcccgttaccgtcgtcgctctgattggtcactatcaccgatccgaatgtcagatcgccagccaacatcttctcccgaccctcctcatcaatgaacagcatgttgcaatactcatcatccggcccatcctcatgcactagttgcattggtagcgcgtgaattagctcctgtctgcagttctcgtgagtttttacgccaaccagatatgatttgatatgctcattttcaatgccctcatagagcgttacaggcgtgctatcgacggcctccgttctgtttaaaactgccatcactctttcatgatctgccatctttccgtagtcatacccgttatcacgagctacctgcttgtttctcttgactacgtattcttgcggaacctttccgagatagcgcccaagaatgttgatgcactcgctatacggctggccgcttaacttcattaaccagccgatccccttatcggcaccgcaaccgccacagtatgcgccgccatcacctcgcgtttccagcttgtcagtccagcggaatcggtctttgccgccgcagttcgggcagtcctggtgcttgccgttgaagtatcgagagtggatgccgcaaatgttctgcaacgcctcgcgccacatgccagccatgtacggcaaaacctctttttcatcgtaaaaatccacgtcgtaacccccaaataaaaaacgcctacacgagaatgataacccggcaggcgtttagtgtttagtcaaattgtgctatcggactacgcggagcatttcgcggcggtcgcatcggcgcgtcactggcttgccgttgctgtcaaatcttaaatcaggtcggcagaatgaggcgcgaaaacctttgcaattgttccgtcggtagctcttatgtactagataagcgccatcggctgagatcataccgcgcttacgccactgctgaacaacctggatactaactcccaactcttttgccgttccagcgataccaccgaaggcatcaataaccagctccatccgcgcagtcaacccagctcgaacctcatccttcagcacgtagtaaccagtcggtcgcttgcgtttcttcttatctttcccgcgcgacgttccgttgttgccgttcaaggttcgcttatcaaccattgccatttgctccataattcaaccctcatagcattttttgttaaacctgataaaatgttccatgtattatacacgcaactatgcgaatgacaaattaggattgacaatggcaagcacagaagaagacgtagcatattttaagcgactatttcgttatgaaggcggaacactgattcgcaaagttacaaccagtagtcgtgcattcgctggagactccgtagggtgcgagaacaacgttgggtatttacaggtaagcgtaaaaagcaaacccctatacgttcaccgaatcatttgggaaatgcataatgggcctatcccagaaggaatggagatagatcacatcaaccaggtcagaacagataacagaatcgaaaacctgcgactggtaagccaccaagtaaaccttaaaaaccaatcgatgaacagtggcaatactagcgggcacgctggcgtaagctggtttaagcgaggcggtaagtggagggcaacaataaaggttggcggaaggcaaatacacattggttacttcgcgtcgtttgagtcggcagttgccgcacgaaaagcagcagaaaaacaatatggttttcatgataaccacggagcagagaaaaagaaatgagcttatcgattgagcaacaaatagatctatacgcagacaaaatcccggcaatccaaaagagatttaccgttggaaatatcgttccgtatccatatcaggctgtggcttatattgagacagccaaaagaatagcaaactacaccgcaccgttttacattaaggcttcggtttccgccgggaaaaccatcatgatcgccatgctcgcagcgcagtgcaaggcaatgaacttacccatgatggttcttgctcgccaggccgagatcgtgaagcaggattccgaggagatcagtaacctcgacgttccaaactccgtttattgtgccgggttaggcacgaaggcggcatacttcccgatcgtcgtcggatctgaagggacggtggttaatggcctgtttaaaatgctgggcgactacgtgccttcagttctggctattgacgaatgccaccaggttgactggcaagatctggcggaagcgatcgccaacaatgaatcgttcgagtacatgagccgaccgaaggataagccgtatcgcgtgaacggggaactggtcgatgccgaccacccatacgacgaaaaattcgacgacgtagaattcggcggcggtcgcacgcagtacactatcgtcatttgtgagttaatgcggaggtgccttgagaagacagggcgagaacttcgcatcgttggctatactggttcggagtttcgcggcgtcattccgattttacaggaagacaagagccagcctggtttttggcgcgagcagatcaccgacattaacacaaactatcttgtcgagttcggatcggtggttccgacaatttttggtgatactgaatccgaagggttagggtatgacctatcagaattccacggttccagtcaggacggtacgcaggattttagcgcggaagaattgcgcaagatggaaaagaaaatccatgaatccggcgaaatgacgaagctgattatgcaaaaggtcgtggagcgtgcgaaaacccgaaacggagttctgataacttgcgctggacagcggcattgcaaggaggcggcgagctatctaccgccggacgcaacatacgcgatcatcaccgaaaagacgaactcaaagaaacgcggcgaaattttggataaggcgaatcgcggtgagatcaaatacatcttccaggtgatggccctaaccactggcgttaacgttccattttgggatttttctgtgatattgcgcaagatcgggtcgcttacgttgcttattcagcttttggggcgcggaatgcgacttctgaaggactggcaaaaacagccgccttactcgtgggtgaaagaagatcaccttgtctgggattttgccggaacaatggatgacctgggccagttgtatttcgatccgatcttggagcaggcgcaataccaaagacgcaagagcagcaagaacggcccgaaaatttgcccggtatgcaagggggaaaatagcgagtacgcccgcagatgcattcacaaagacagtaacggcaatcggtgcgaatacttctggatctcgcagaggtgcgaagaccagaaagacccgcgaacagggaagattaaaatcaaggggtgttacgctgaaaatgatattgttgcccgccaatgcagatgctgcggcgttcagcttaaagaccccaatgacaatctcaccgggaagcactatacgcagaatgactggtatgatgttgtctggttcgatatcggcttgactcgcaatcagtccgggatcatcttcaattacgtgttactgaaccatgacggcgagcgattcaccgcaagggaaaagttcttcccggaatcagagaatcagatttgcggcaagctgtggcggcaaaaggcagtcttccagcacgttagcgacgcggtaatgcgtggcaagttgggcggaatgaaaaacgcccgcaagatcctggagtatgcggaatacttccgcgcgccgaagcgcgtaacgcatcgcatcaacggcaagaaggaggacattatttcccgcaaagactttggaggcgaggagtgattacagacaaaggggattacctcgaatattacggcgggcctgtaaaggcttgcccacttgaaaaaatcgaccagatgaacagcgtttcgtggctgcgttacgaataccccgattatctgttctggcatacggttaacgagggtagcaagcacaaggcgagcgccgttgcagatcatcaaatgggattgcttaaaggcgtaagcgatatccttgtgctgattgggctgggcggaaaatacccgttcgccgccattgagctaaagcgccagggtaaatcccaggcatcgccagtgagcaaggagcaacgggaattcctcgccgccgtccgaagccgtggcgggttcgctgccgtggcctatggattcgagcagtttaagatcgcgtttgaagacgcaatcaaatagcactttttgttaaaactacccggcgcgagtcgggtattattctcccatcgaaacgaagaacggagtatttaaaatgaaaaagattattgctttaattgttctatctcttgttctcattggttgtagcgaaaaaccaaaaacatatatttgcggtaatgaatcgtttgaagttactagcgactatattaaggtggttcgcggtaatagcgctggcgttttaattgatggcattggtgaaaaccagtataagctggttacaccacttggaacggctttttatactgttaataaaaacaccattgatattaaagttagcgtttatcagaacactttaacttgcgaggttaagtaataatggcaaaagatatcacagacaaagacactcacgacgcgttcacgactttcgaacagcttgagcgtgaaacgttcataggcaacgcgcttgccactggcggacactatcaggccgtcaagcctgataaattctaccaggtaacgggcaaccgctacgccgggagcaagacgccggatatcgtccgcgacaagtggtcaaccgatcgcagccttattgcttacatggaggagcgttacgggccatacgacctggacgccgccgccgaagaaagcaacaccgtctgccctaagttttacgacgaaaagaccgattgcctcaagcgctggtgggggaaaaataagcacgtatggcttaatccgccttactcgttcccggatccctttgtgctgaaagccattgagcagatggagcatgacaaccagatcgatattttgcttcccggcgacaactctactgcgtggttccgcgacgcacagaaggcagcggctgagatcatttggattgtcgcagacgtcacggaggacgaagacggaacgcaactaagccgatccggtcgcctagccttcatcaacggcctaagcgggaaaccagtcgacaacaacaacaagggtagcgtgattttcatcatgcgcaaactcaagccgggcgaggagcaaaaaacgttctacgtcccggtaagcgaaatctgcccttcattaactaaaaagcgcatgcgcaaacgtgggatctgaaaaatggaacagcttgaatctttcaccgaatacctccacatcgtcgtcactctgctggacaagtacggcttcatcggtacggatgaagaaaagatggccttcgccgatagcatcgatggcacttatcaagaattcatggataacggcacgccgcttgctgactggcccgcgattcttgagcgcgaattgctggattttcgggcgcgtgaaggtgcggaatatttcgcgaaacagcactaattgttaaacaatgcccgccgcgagcgggtattattgttccatcaaccaatcaggagctaacgccatgaacaccaaaaccattgccgacaccatcaagatcgcacaagttaagccgcgcatcgtatctcgccacctgattaacctttctcgcctgtgcatggccgactacgtggcgaagcctttagagaatggccttgatggtgaaatcggtgcgatctacttccgcgccgcgcacggcatcgaagaaattcacatgtacgagcagatggcggaatgcttctgcatttacggtgacgaatgatgattgtagaatctggccgcgctgccgtatggcagcatgccaaagaggctggcattagtgacgatatcgtgatgatcgcaaagtatttcgatatcaaggatatctccattgtgttcaatgggaaatttacctatcttcatgagcgaccactgaagcgaacgcgtatagcggttgcgacgcgggcagaggccgacgcgctgaagatgttcattcacgaatctaagcagaccaaaaaatattacaagtagcgggagtgttgagaatgcgatatattgcgatcctgattacggcggtggttctcactatcgcaatcttcaactacgcaattcaattgggataaattatgcaacctaaaatcacagacgaagaatttttagccgcccgcgaggagggcaagacctaccgcgagatcgccgaagagttcggcatgaacgttcgcagtgttgagcgtcgcggcgttcgacttgcccgccaggggcatttgcacggtaacaatcacgtagcgaagcacatcccggacgggttcggggtcaaaggcacatcgaccatgattcgcgcgaacggtgatgaagttgtgcgctgggtcaagtcagaagtagaccgcgaccgcatgatcgctttgatggaggcggcgcaagcatcattctgcgaagacctacctcgcgctgaaccgcagcctaaggatgaatctaagttttttattgaggatcagctcgccctgtatccgatcttcgatttgcacatcggcgcgatggcccacaagcacgaatgcggcgagaactacgacaccagcacggcggaaagggttcttaaccgcttctttgactactccgtttcggttgccccgcagtcgaaaaagtcggtcttgctggtcggcggtgacttccttcacagtgacggcctggacgcagtaaccccggcaagtggtcacgttctcgatcaggatagccgttacgcgaaacttgtttatgtggctattcgctccttgcgccgagctgtgtcgctactgctgagtaatcacgaagaagtagaggtgcaggtaatcgaggggaaccacgatcaggctggcatgatctggttgcgtgcagcgctcgcagcgttctatgaaaatgagccgcgcgtattcgttgacgtcagccctgcaattatgcatcgtaccgtgtggggcaaaactatgctgggctacactcacggccacacgatgaagaaggcagaaacgcgcctcgccgcaatggctacagacttccgcaaggaatttggtcaatgcgactacatctacacgcattcgggccattggcatcaccagaccgtaacggagcactcgttagggattgacgaagtacacggccagttaggggccaaagacgcttacgccgctcgcggtggttggcgctcatatcgccaggcggcggttattctgtacagcaaagaatatggcgaagtaggccgctttatctaccgcccgaacatgtaaccacaacggccccgcgaggggccaacaaggaaaaccgatgaatagaaatatctgcattttcgatctcgatggcacgttgtccaatggcaaccaccgcttgcacctgctgccgaaaaaggatctccaccttacagaaagttggagtgaatttaatggtgcatcaattggcgacagcccaatccaaagcacaattgatgtagcgaatgcgcttcatcgctccgggatgattgtcgttatcctgaccgggcgatccgatgaggtgaagaccgaaacaatgatttggcttgaccgttacggggtgaaatatgacaggctcatcatgcgtcgcgccagcgacaaccgtaaagacacggtaatcaaggaggaggagttacgcaaaatcggaattgatcgcattgttgcggcatgggatgattcacccaatgttattgcgcacttgcgcggcctgggtattacgacttaccaggtctgcgactacggagacaatcttcaagatcatttaaaatcgcacggagtagacaaatgaaaaatgtaattattctcaacggagcacccggaatcggaaaagataccatcgcggaaattatctcgcggaagtgggaatacaagaaccttagcttcaaacagcctatgtttgccatcgcgcgtgctgtgcttggatctactgattttgcacgctttaccgccagataccacgaccgcaagcacaaagaagtgaaatgcgattttttgggcgaccgttctccgcgtgaattcatgattcacattagcgaaaacttcgtcaagccgaccctgggcaaaaatcagttcggcaagttgctttgcgattcagcgctaacttcgccgtttaactgcatcgtcagcgacggcggttttgatgaggaggtcgagcacgtcgcagcgcatgaggcgcttaacgtatttgtcgtccgccttcatcgtgacggcatgacctttgagggtgatagccgcaaacacattcgacgacccgatctgatttgtgacacgtatcacgaacttgattttgatatgaccactggcgagcctgaagacgacgcgcaaaaaatccttgatatggtttcagatgttgcattaaaattataaagttaatgcctttattatcaccaccttaacgattgggaaccttgacgggttcccttttttttgttcttaattttgccaaatgaatatatcatcaccttaccatttaactaacagaggttgcatatcatgcgggaattcatcaacgcggcaaccaatagcagcggcggtgttgcccttgcgggatctgcatccgggcaattaatcattgctgccattggtttatttttcatgatcttatttggctcaatcggcacgtggctgaagtggaaagactcaaaagccatccgggaggcgattgattctggcgacattaaagaggcattgaggatcaggagcaaataaaatgggaatgaaaacgcggcttactttcgcggcggcggtggcgatcgcggtcgcgttcctccccgaagtggaggacactaaatacacggtttatacggatatcgctggcgtaccaactgtatgcgaaggaatcacaggcccggacgttatcaaggggaaaacctatacccggtcagagtgcgacgcgcttttaaccaagcatatccaggtagcaaagcgaaccgttgacagcaaaatcaaagtagatgttcctgacaccttcagggcgtcgatgtacagcttcacgttcaacgctggcggcggcgcatattctggcagcaccatgctgaaattaacgaaccagggccgattgcgcgaggcgtgcgagcagctatatcgctggacgtactaccgcaacccgaaaacgggtaagatggagaagtcaaaaggcttgcataatcgccgggttcaggaatatcaactatgcattaaggatctaaaatgattaaggtaattggtgtggctcttacggttgttcttctgtctggttgcgcttccagtgtcccgatcctttccgatctggtgggcagcaagccggatatgacggcgcaagtaggcgcggagaacgttaaacaggcggttggcgtgacgaacaaaacggacacgtcaagcaagcaggagactacgttcaaagagtcggcggtaggaaaggttgacacgtcgaacaaaaaatccgtaacgacctccagcattcacgccaaccagatcacggcggacaagatcgagatccgaaacgatgaaagcggaagcctgactccgtggctgattggtggtgttggggttgtaatgctggcgataggtgcgttcggtctttggcgggaacgaaaaaacaaaggggcgtaatgcccctttttctatatgtaccgcttgacgtgcaatagcgctactccgtcttcatcgttaagaccatgttcaaccgtgttggttgcagccattccttgatagagcaagatgagcgcggcacgcaagtaattttctggtgtgatctgtttcacacaaacaagcctgtgaacttccgttatcagatcttccacctggtttcccgaaaagctgttcatcactgagttggtcaaggtgcatcatctcccatatgtatcggttatccatcccttcgaacgaccggaaatcaaaacctatttccctgttatccggccccgtacaccacacagagccgttttttccgtcaaggtatccattcgtatagcttcgcgctaaaaactccttagagaccattgaggcgaacatacgttgcgatacgttggcggcttttgccagtcgaggcgcttcgcggtgcgtatagacgaacttcgcaaaatcctgccgggtgaactcccggcgagattcgcagaacttgtaaatgtcaagaataaacatcaattacctcatgaacgacgggttgataaagacttcggaatccatcacgcagataaagcctaattcctccatcttcggcaataagcgttccttaatctttttgctcaccccggcctggcctttgaagatcttcaggttgcggcaggcgttataaatgccctggacggtcataacaccttttgcctgtttgcagcgactggcgataacgtcatacatcgctttaatttccgctccctcaccagcaaagccggaagagtcagccgacgacaaatacgttttgctcaattcatggaacataatgatcgcttcgtcaatggtcgccgtgtcgatcttcttcgagcgcttcccgccgggttgccagttccggatcgtgtgaatcacggacgccagacgcataacctgcttatcaaacttacccatcgcgccgcgaagcattgtatgcgaatacttgccgccgtcgcctaactccggttctaactcctggcgggccttgttcagcctacgcattgccgcgtcagtaacctgcaacttaatgttcgactcgctcataatgtcatgaatcagccggaagtaatccgccttcagtgactggtcgatcggctcataggtcgaattcccgttttcgtcgatgaacacgcgttcacccaaacgggtttgctcacgaaccaaaaggaagcgttcagataccccgatcccgcgagagccggcctgcataatggcgtcgatggtttcatcctgggcaattacgcaaatgcagcccaaagcctcgaatgacatattgttgctaacgtcggcacgagcgatcgatacgtggcctttatcccatgctttgagcaccagttcgctgttcgtcttcttaccgccatcgtttccatacgtgatccctaaaaggctgttaaccgccgtcgcctcatcggaaataacggcaaagtttccctgtcggttgttaatcttcgccagaccttccggggtggtatcagataccgggaaagttaggtcacacaatttttctaacttctcctcaagttcgtcacggtcttcaaaaagtttcaccatatcagattgcgataactccccttttagcgcctgcttgttggcggacagcttcgccatgattttcttacgctctttctttcgagactcgttaatgcgttcgacttcggcgacaataggatcgatggcaagcgagttaatggcagacttaccagcggaaggcggctgcgacgtgataacgtaaagcgttgtcggttgctcgctgccgtggtactcgacccaaaagcggcccatcatcgcggcggatacggttccgagaaagtgcatgtaagcggatgattccgggaactgaacagaacgcgctgcatttagcgccagcttgccgacaacatcataatcattggcgatcgagattgttggatacttatccgcgtttacgtcgatatctttgggctttggccagaatgaaacggagtcacgatacccgttcgcacgaatcgcaacgcgcaggggactgatcccctccctttctgcgatggcgataatatcttgcggtgatacgcggtcatttaaaaacatgcccttgctcctgattggttaatcgttcggctaatcatatgccgtattaaatccgagatccagtgataatctaaacacgcttgaaaaacgcgcttggattatcggggcgcatggccccgaacccgtcacaggtatttagcttcgaaagtcgttccgtccgatacactgaagccaacttcctcgcggtacagcgtccagcggcatccatcacgatcgaagatgtatccggcaaccgcgccgagcgcacgaccgctttctacctggtagcgcttgccgacgctgaaggattttttcatcgggttgctatggtcaaggccgacgcattttagcgttttggtttttagttcgatgaacgtcgcaatcacctggccaccagcgccagcaataaacaactcgccgctaacgcctaccgacaaaataacgcgcttcttcttcagttcgacgctgtcatataccatcattgacacattgccttcatcgtcgacgcgggcgggataaaggttattttcgtgtatattaatagcgcggcttgacgtgcatttaatcttgattgacttcgccatttattttctttctccgatctcgatgtacaggtttaccaaatccagaaagtcagccttgcttttgcaacccaacttaaagccaacgtgcgactcaattttattttgcatcgcagccagtgttgcgccgccattattcatcctgagaacttcgcggcatacttcggcgagcttttgagatatcatttcttcaccacctttatttccatgccttcgcaagcgctcttgatatcattaatcagacgattaagccttaaatcagtcattacatggtgatgacgtatatcaataattccagcaacgactaacagcatgacggcaaagataaaaccaccaggcccggacatacacaaaacagttaacatcatcaagataataaatttcatttccgttttactccgttgcgtttcgatggggtgattctacccgactttcgccgggtagttttagaaattcgtgctattctcgataattcgcctggaacacggcgcgggcaaaacctcgcggagtaatggaacgcagcattttagtcctttctgaccttccacccaaaaacttccaggcccaaaagaaattcacgccttctactccatccggcggcgtgagccgtttcggttcgacaaaaccgtttccgtgccatatgcacgttttcttcgtgtaattgtcacagtggggcattttgggatgccacacaggctcgttcggagaaacatagccaccgaagtcgcgcggatggaaataaaaatccggctttcgccatagtgacgataatttcccgaccgggttttcgaccatccaggggcaaccatacttattgcctaattgctcgaccatcttcgcatcccctgctgcggataatacgtcattatcttcccttacgtgcttgattccgctatgcgctaacagcgtgcatggcgggaaagcgaaaatgaagtcaggatctggaatgccgagaatcgatcgcttaacgtcaaaatccttgtcaatccaaatgttaacatactggatatttgggtgaaccattcgaatgctatattctccgtggtcgccggagtcggcgttgaaacagtacaccttgcatcccttgatggcccacggcaggcccatgatgccggagccgtcgaacatgcagtaaataaccttttctttcatgctttccacgcctcaatgaacattctgttcgattccagcgtcagcgtgacgccagccagggaggactgaatgagacgaccgcccggaaccgtcccgatgatgtagcggcctttcgacttcgtgatcgtgatctgagtgaagccggaggcgcggttcatgcggagaacgacgcggccatgagcgttcaggacggcgagaatggaatcagtcttcggatggttcattgtgtagctccttcgtttgttggtatggggacagtatgccactatcccgctgtgttgttttagcaaaacgtgctattccggaacgcaggtcgcgtaatcctggctgatgtagatcgtgcgctgaacgcgaggttcgagatcaccgagttcctggatggtaacatcgttgcttcctacccggcacggaaccgatccgaaaataaactcgccagtctgcttgtcgttgatttgccatacattaccgccttcctttttgacaaccaggaaaggcgcactgtctgcactgaactcttccgggccacgaccgtagtaatgcgtgatcgcagctttggccgcagcgctgaaggcatcggtaacgtcattggtcgccttgtctcggatggccttgatacgttcttcaggcgatccgatgatgtaggaaaagctgttcgaaatggtaactgttcgcattatattttaacctcgttttggtggatgaagtcggcgacgtaatggcattcgatcgggttctcgatacccgccagcacctcgcaagacccgttattcagtagctggcaatgctggcactccgcaccgccaacactggcaatgacaatggcgatcccgttgcatgaaccgccgaacattcgatgagggaagtggtaagcatcgcaggtgcaaaccacctccccggcccgccgtttcctcatacctggcccttctcgatgcagaaaacccaatcacgagcgtcaaccgcaaagcgtgcaacgccgtcgagcaccacgaagacagtaaacccgttgacgccgcgacccttctcgatatcggtcacggtgcggaacagatcgcttgcgccatattgaattttatccccgacgactacatccgcaaatgctttcatggttaatctcctgactggtttcgatgggttaactataccaggcctcgcggcccggcgtttagcaattcgtgcttatttcactgctttcttcgctgccttgtacgcctctttgaaagccggaacatcttcgaccggaatccagaagccggagccatagccatcgtcatagcaagggcattggtcgcagtagtcgccccaggttttctcttctccgccgacagagaatccagtgggcattttgcataacgcttcctcaaccgcttcgatcttgtcggcgtcgctatccatgataacgaagttccacttgccgttatactcgctgcccaggttgattgattcgcgttgaagtttcatagctttagcccctttggctcaattcgtttcgttgaagtcatcatagcaaagccgatcggatggattttaacaaaaaatgctattcctgcgattgctgattattccaccgattcggaatagtggaatagatggtgattgcacctgattccctggtgattagttttgacgaatcatgattgcttttgattgtttcattttgtgcaacgattttgtgagtgtttcaggatttgcaacgaattgcataaa

SEQ ID NO: 240 - DNA, 49441 bp, synthetic construct
  source 1..49441: mol_type = other DNA
atgtctgaagaacgtagaaaacgcgtaacgaaatcgcactttgcaggcaactttaaagcgctatatgaaaaggagttcggcgtggtgctagggcgcacggcagagatgacgccggaacaattttttgatatcgcaaagcgttacttccagtgggccgaagataacgcaatcaaggctgcggagacggcaacgtttcagggcgacgttaacgagtggggagtgaacaagcctcgaatttttacgctaacagggttaagcctgttttgcggcgtgaaccagtcaacgcttacacgctatcgccacgatcctaactatgctcccgtcatggagttcatcgactccgtgatctatgagcagaaatttcagcttgctgccgtcggcatgattaacgcttctttcgtcggaaaagagatggggatcgataagccaccagtgctgaacatcgacgctatcgccggggataagaacgagatcaccgaagagaggttagagaaggcagtgaccaatattcttgataagctgtaagggtcagatatgaacgaaatgatcatttgggaagacctgtcgccagccgataagctggcaattaaggcgcttagtacgcgcaacttttcgctattcatgaagatctggtttcagatcatccagggagaaaagctgatgtggaactggcatcactcctacttttgccacacggttgatgaaattatcgccgggaagcgcaagagcacgatcgttaacgttgcgccaggctccacaaagacggaggcgttctcaatccacctcgcgccgtatgcgtatcttaaatgccggaaggttcgaaaccttcagatctcgcagggtgacgcgctgtcaaaaggcaactccgatcgcgtgattaagatcttctcatctaacgagtggcaggagctatggccatcaaagttcgggcgcaagcagatcgatgaatttcaggtcatggacgataacgaccgcgtaaggctggaaatggtctcccgttcgtccggcggtcagatcgtcggtaagcgtggcgggtacatgacgccaggtttcagcggccttatcgcgctggatgatatcgacaaaccggatgatatgttctcgaaggtgaagcgtgagaaaaaccacgtactcctgaagaacaccattcgatcccgtcgagcgaagaagaagaaaggagacgaaacgccgatcctttccgtgcagcagcgattgcacgcgcaggattccacctggttcatgatgagcggcggcatggccatcgacttcgatcggattgttatcccggcgatggtaacgcgggaatatggcgaatcactccctgactggttgcgacctgagttcgagcgcgacgtgctttccggcccgtcggtggtaattgacggcgtggaatactggtcattttgggaggaaaacgaatcgatcgagaacctggttgcgctacgcgaagccgatctttatacgttcctttcgcagtatcagcaggaaccgatcgccctgggtggcaacgtgttcaagtcggagtggtggcgctattacggcgattccgacaaggcgcacgagccgcgcccggacaagttcgaatatacgttcatcacggcggacaccgcgcagaaggtcaaggagctaaacgactactctgtaatgtgctattggggcaagtatcgggatcgcgtctacttcattgacggaattcgcggaaaatgggaagcgccagatctccgcgttcaggccgaagcattcatcaagcagtgctggcgtcggaacaaggagtgcggaaaccttcgccggatctacatcgaagacaaggcgagcggtacaggtctaatccaggatttaacgaaggcggtaaacggcatgggcgagatcgtcccggtgcagcgcgataaagataaggtcactcgcgctatggatgcacaaccaatcatcaagggtgggcgtgtcgtgctgccggacaatcacccattcgttgcagagcttgaggcggagatgagcgcgtttacatatgacgattctcatccacacgatgatatttgcgacaacgtgtttgacgccgcaaacctggaaatgaacctgagcgacgatccggtagagcgaatgaaacgccttgcgggattgaaaaagctgggtcgctaatacataatgtgggcctgacggcccacacttaaacaaggttgaaatatgaataacattaagatggacgactataatcaaatctttaatggtggcgctggttatgcgtcaaccctcgcgtctatcgcggcaagatttggaacaatgtcgcaggttgaagagttctatcatgaaaacggcatggcgaagaaaatcgttgacgtgatcccggaagagatggtcgctcccggcttccagctaaacggcatttcagataacaccaagtttcaatctgaatgggacgggttaaatctggagccgcaaatcaccgatgctctttgctgggctaggctgtatggtggctcctacgtcctggcgatggttaacgatggtcgcgcattgacttcggcagcgaagcggggtaagccactcgaatctatcgttgtttacgaccatgattccgtttccgtcgcagaggaggaaaccagtccgcgaagcccacgattcggaaagcctaaaatgtacgaggtgaagccgctaaacggcgggcaaccgttcaaggtgcattatacccgtatgcactacatcgacggcgagcgcgtaaccaacaaggtgcgcaagctaaataatggcgctggtggctcggtgctgaacaagtcgattattgaagcgattcttgattacgactattcggaatatctggcgacgcaactactgaagcgcaagcagcagggcgtttggaaggcgaaaggcctggcgctaatctgcgacgacaaagaaggcgagtacgccgcccggttgcgcatggcgcaggttgatgctaattccggcgtcggaaacacgatcggtattgatgcggacgacgaagagtacaccgttatcaactccgatatttcaggcatcccggaattcctttccgcgaaaatggatcggattgtcgccctgtcaggcattcacgagatcgtgctaaaaaacaaaaacactggtggcgtaagtgcaagccagaacacggcgctacagacgttctacaaactggttgaccgcaagcgcaatgacgattacaagccgctgttagaattcctgttacagttcatcgtaacggaggatgaatacagcgtcgagttcgaaccgttgtcgctgcctaccgatgcggagaaagcggatatcttccagaagaacgccaacgcggctcgcagcctcgttaccgaccaggttattgacgccaacgaagcgcgtgatactctgtcggcgttgattcctgaactgaagctaaaaggcaacgctccgaagcagaaaaaacttccggatcgcgccgctggttcaggcagcacgcaaagcgcagagatcttaaacaacacggaggcggatgatgaaagttaacggcagaatcccaaactggcgttatcctgaagcaagcgagcgggagttatcccgctcaatgcaggacgcggtgacagaactcgtggtagaaatgcgggatcgcttagaccgccttaaatttgacgccacggctgaggaaatcagccaggcggaagacgatatcagcgaatctgccatcgtgttcttttccgccgtaattgcggcgctttcctccattgggttgactatctatagattcaattctaaacagtggcttgcaattgcgatcgcggctggcgggcggaacaacgaatcagttatgcgccttaaagaattcggtgctggtgggtatgaagactggtatcaggaatcgctaaataagtggcaggattacgccgaagcgtcaatcaggaagttagcaagcgatatagttgctgactggacaacgaaagttagaaccgccaacaacattggcaagtctcgcaagcagatcgatgaaatcatcgaaggtcgatacgctatctatggtagttggtcgcgcaaccgggcaagcggaatcatcggaacttttaacagtatgttgatgatgcagcgcctaaaagatgctaaagtatcgcattacttttggttcgggatgatggacgaccgcgagcgcgagagccatatcaagctagaaggtaagcgacgccccgttaatggtgacggaatcttccccggcgaagaatacggttgcaggtgctgggcggttccgtcatttgataatgaggatgattgatggttaactttaatgattactttaatcacgtaggaaaggatctgatatggaagcgagcaacatcaaaccgcgtaaaagttggtgatgttgccgggtggaaagatgagcatgggtatgtatacattagattcatgggcaaactgcgacaagctcaccggatcatttgggaaatgcaccacggcccaataccagaaggaatggaaatcgatcatattaaccatgtaacggacgataacaggatcgagaatttaaggcttgtaaccagaaaggaaaactgtaaaaacgtatcaatgagcgtaacaaataagagtggagttgtaggcgtgagttggtgcaagagaacaggtaaatggtttgcatccataagggttgataaaaaagagcgattcttaggtagatacgaagacaaaaacgaagccatttcagcaagaaaggcggcagaggcaaaatacaatttccataaaaatcacggagataaaaaatgaaaagagttcaaaggttcgacacggtaaagatgaaggccagattcgatgagaacggctttctggttgatactccgatcgtggcgcgtatcggtgcgcagacgtaccagacgccaaccgggcagcgcgtcgagttccgcccgcgttcggaggtgttcgatgctgaatcgctggcttcataccagggcaagccgatcactttgggtcacaagatggtgaacgcgcagaacgcaaaaggccttgtcgttggctcgtgctccggcgctggcaaagaagatgggattggtgttcttgttccggtgatgatttacgacggcgagtcaatcgagcaagccaaaaagcgcgtagctgctgagttatcagtgggctacacttcggtcgatatcgatcgcaaaggttggggtaataacgcaactggcgaatattatttcgatgaagaccttccggaaaacttcgaagagatgaaaaatgattccgtctctgattgggttcgctttgatgcagtgcagacgaagattcgcgtgaaccacgtagcgctcgttttccgtgggcgtgccgggattgcgaaattaaatcttgatagcgaacaagaattcccctatgatgacgactcaaaccacaaaggagctaaaacaatgatcattaaaattgacggcgtagatgttgaagtagcagataacgttggcgcttacattgcaaaactcgacgcgcaagttgcatcggcaaccagtcaggtaacgagcatcaccgcagagcgtgacgcacttcagaccaaagttgatggcattgaagatgaagtcgccgcccgcgttgctaaaatcaaagccgacgaagacgcaaagcagaaagttatcgcggttgtttctgccgctggcgtcaagtgtgacggcctggatgttaaggcaatgaaagttgcttacatcaaagaggttgacggtcgtgatctgtctgataaagaagattcgtacatcgacgcttcttttgactttatcgccaactctgataagatggctggcaatcgctccaaagtcttcggcaaaaaagaagatggcgagcaaaaagacaaaggcggcttaccgaaacttgacggcaccgaaatcatcgatccgcaggcaaaattccgccgctaataatttgcggccttcgggccgctaccagaccaaataaacaggagattcaaaatggcacagattccagcttcttattcccgcaagcgtgatattgccgtagcggggcagatcgctgatacgtcgctttataatatcgacggcacttgcgttgctgaaggcgatatcaaggctggcgtactggtggcttccactggcgtagtttccaatggccataaggtcgttaagccagcgaaagcagcgagcgacgtcattgtaggcatcgcgcagttctcgcaagcctactcgcctgaaggcaagtatgacgatgagagcgcggttaacgttatgactcatggccgcatttgggcgatcgcggacgcaactgttactgaagcagattgcgtgtttgattctttcgccacctttaccgcaaacggcaccgtagcgaagggtgatgccggggttatcaaaactggctacaaacacactggcgaatacaccaagaacgcagatggcaccgttctggtgaaagtgcaggtgcttcagggcgccgttgctccagcggctgcaactggcggcgctggcgtataaaataaggggcttcggccccatttttgcaccagaaaaaaacctttgacggcttaacgattcgtgatattcttcatctcgttaagccaaatacacaaacaggagtttttcagatgactatgaaattagatgcattcgaacagagtgcaattaaggtcgcaatgcagggcatgggcgtcgatgccgcaaaactggatgcttacggtatctggactgttaagcagatgactcaattactgaatcgccagtatgagcaggcatacccgcagaccagcgcacttgagcttttcccggtaactaccgagatctcgccgaccgcccgccgctttgagtggctcgaattcgacggcgtaacctctgcgaaaatcatcgccgattacaccgacgatctgccgaccgttgaagcgatggcaaaagagaagtcagggaaagttttccgcctgggtaacgcgtggtttatttccatcgacgaaattaaaactggtgcagcgctgggttcaagcctgagcgatcgaaaagcaaccctggcccgcgaaggtcatgagacgctcgtaaacgatctggtgttcaaaggctccactcctcacggtatcgtgagcattttcgaccagccgaacattaaccgcatgaccgccagtgctgcatggggcaatgattcagcggcggctgaaaaggcattcgaagatctggaagacctgcttaacatgatcgaagaaaccacgctgggccgccatcacgcgaccaacatcgtgattcctccgtctaagcgtcgtcttctgacgaaaaagatgccggacactagcggcgactcttatctgacttggttcaccaagaaccacccgaacatcaccattacggcgatggcggagttggaagatattgacggcgcaggcaccaaaggcgtgctggcatacgaaaaagacccaatgaacatgagcatcgagatccctgagcggttcaacatgctgccgatgcagccgaaagacctgcatttcaaagttccgtgcacctccaaatgcactggtctcatcgtgtaccgcccgctgactattgcgattctcaccgggatttaatcaaaagcgccttcgggcgcttttttattgcattgcattctgcaatgtgctttaatttgaaacctaaagtaaaccaatggagcattaacaatggccagtaaaaaagaaaccgtagaaaccgtagaaaccgcagaaatcaccagcgaagaacagacgccgcaggttgttcaactgcaaaacgttggtgcatgtgcaattcgctataaaggcacaaattacgtctatgagcaggttttcgaagtgccagaaagcgagatcgaccgattccgccacgaaatcttcaaaggccgcgtcgagttctacgacaatcctaaacgcacgcgcgaatacatcgcagcggtaaaggcgacagcgaaagagatcgtgcagcctaaaagcgcggaataacaaaaaccaacaaagggcgcttcggcgtcctttttcatatcaggagagcaaccatgaattacacaattcaagatgtgatcgataaaatgcgcagccttgcacctccgcttaaagaagttccagatgaactgctgtctgcatgggttgtgcttgccgaagaattcgtttgcaaatcccggttcggagactccatcgttacggcgatcgcgttgatgaccatgcatctaatgtttttggacggcgcaatgaagcaggaaggcgaaagcctggaatcttacacgcagcgagtggcgtcgttcaccctgaccggggagttttcccaaaccttcgatcgcgtgtcggcgtcaagtgataacgaaatgctttctacgccgtggggcaaaatgtactggcgtatgctcaagatgcgcggcggcggcttcggcctgcttaccgccgggaacgtgcgccgctgcggaatggttaggtgatcgctatgaactacaaagcaatccaggcacgcgcaagcgctggcattaaattcttcagcgacgctggcggcgtgttcaacaagtacacgaaaggcgctggcggaggaatcgatccggaaaccggggaagatatcattcctggcgaggtggtgacgacaatcaagggagcgatcagggatgttaatgaccgtgacattaacggcgaaaccatccttgctggcgataagcgcggttttttcactcatgatgtgccaatcatggaaggtgacgaaatcgaagtagacggagagcgctaccgcgtggttaatgcccgcccggtaaaaccaacgggaaccgtcgttgcctaccgtccagttttgcgcagggtggcgacttatggctaattacactatccgcgaattcacaggcgcaattgatgcgtggtgtaaggccgctggtgatgcgctggaggacgttgtaaggtttacgtgtgaagatattcaccgcgaccttgtaatgcgttctccggttgatacagggcgcttccgtggtaactggcaaatcacctttaaccgcgccccgctttacgcgattaacgcatacgaccaaactggcgaaaagacaatccagaacggcaaagccaacattgcactatacgcaaaaggggccgggatcacttcgatctggttcagtaacatgctaatctatgcgaacgcgctggaatacggccattcaaagcaggctcccaatggcgttatgggcgttgttgcgatccggttgggcgtttatgttactgaggcaatcaagcgagcgagggcgaaaaatgcattatgatatggcgttaaaatgcaaggcggcagtggctaaatttgccgccgagaacgggttgagggtcgcgggggataacgttgactttatcccaccgagaggcggggaaacctaccttaaagtctcctacgtcgaggcggattcaagatcggttgacctgtcaaggaaatgccgagtctatctggcgatggttcagattgacgttatctttaagcctggaatcggaaccgatcgagcgaggattatcgcccaacgcgttgcaaaatccttccctgaaggaaagattgttgatcgtgacggtaagttatatgtgagcgagtgggcggaggtacacggcgtgcagaagcacgaaacgggttggttcttcccggttcggttcacagtaagatgcgaccgcacggaggagagcggctatccatccaactagcggaacctcacgtcgcttataatttcttgccagcctggaaatatgtaggcataatggcggtgtaaaactttcattcaaacaggagtattcaacatgcatttaccaaacggtgctaaggtcttctttgagaaggctcgcggtgcgaagattccgtttaccgcaatgaccaacgacgcgaaaaacccaaaaatcacggtggcagatggcaagctgaaggtgaaagatattgtgatcttcaccgattgcacctgggacgacttcgttaacaaggtggctcgcgtaaaagcagtgacagcaggcgtggcaacgctggaagagttcgacacctccgacactaacaagtatcctggcggcgcggctactggtaacgtaagcgtgatcactgattgggtggaattgccttgcattcaggatttaggcaaagatggcaacgaacagcagttctataactatcagtgcttgagcgatgagcgcgaacaatccgaacctacttacaagtcggcagtgacgcttaactacacgtttgcgcacgattacagtaacgcgatctaccctgtgttgcgttcagccgacgccagcaagcaggcgagagcgatgtacatgtatatcccgcgagcttccgaggttcgttactggtctggaattgcatctttcgatgacattccttccacggctgttaacgagatggaaacggtaacgcttaacattgcgcttaaaggtgctcacgtcttccttccggttgccgtgtaattaaatggcggggcttgtgcctcgcctttttttgtgcataatagcgaataacacaaaccaatcaggagttaacaaaatggctaaattcaaaattcaaatcggcggcaatctcccttctttcaagctgcctgtaaccttcacttgccccgacggcaaagaagcaaccatcaccatgacagtaaaacatcgttcaaccgatgagatgaaagacttttatgagagcgaagataaagcgccaaagggtaacgccgagtttatccgcttcatggctgaaggttgggatctggatgacgaattcagcgatgaaaacatttcctggctttgcgctcacttcccggcgttcgtcatggcactgccacaaacttacatggccgcgctggcgggccaccgtgcaaaagtttaaggcgggctgtttatctcacgcttcagcctgagctaaccgatcgccagcttgcggagtacgggttaaggcgatcggattatgaagcagatcttgaaacgatctactttgatgaacagaccgcccaaagctggcagctattccaggccatgcaaacgcagtggcgaatcgggatgaatggcccgacggggcttgactataatacgttgcctatgctgttcgaattgtataaaatcgacaatcgagaagcggcattacttgacttgcaaatccttgagggtgaatacctgaaggagatttacaagaaatccaaataagcgcctactggcgcttttttcatatgggggcgaaacatggctgataaagtagctgggctaacgtttggcgttgacgtgtcgcaggttgataaagcggtacgatcactcgcagaactgaaaaaccaaagccagcaaacgggcgctggcctacagtcacttgctgacgctgaaaggcgggccacggcgcagaccgaggaaatgaaccgcgcattgcagcgccagaagcaagagactgacaaatcaaaaaccagctttagcaggatcgcaagcgccatcgatcccacgatcacaaaaatggccaacttgcgcaaagcgacggaagaacttgataaagcgtgggcgcttgggcttgttcctgacaaggaatttttccgcctgggagccatcattgaatccacaaccaacaatctacggcggcagcaggcggcgctaaccgaagaaggtcgcgcagcaatcgcagaggcggaggcaaagcagaaggcggcaaatgccgggcgtgattttgtcgccagcctgaaacagcaggctgactccatcggaaaaacacgcgccgaactgctggaaatgaaggcggcgcaattgggcgtatcggcagaagcggccccgttcattaacgcgctgaaacagcaagagcaggcgttaaagaaacagcaaaacgctatgggcctggctggcatttctgccgggcaatataaaatggccatgcgccagttaccgatgcagatcacggatattgtaacttcccttgcgtcaggtatgccagtctggctggttgcggtgcagcagggcgggcaaatcaaggacagcttcggaggcttgagcaatacgtttaaggtgttgttgagctacatcaacccgctaacggttggtgctgcgtcgttgggtatcgccctggcggcaatcgctaaagctggttatgactcctggagtgcgcaacgagaactggcgaatgcgctggtgctgactggtggctatgctgcgaccacaaccgggcagatcacagccttaaccgaagagattaacaaaaactcatcggccacgattggcagcattcaggaaatcgcaacatcgctcgccagttctggtaagtacaccatcaaccagattaagcagatcacgaagactacggcggaatggtcggcgcagacgggggagagcgagaagacgatcacagggtattttgatgccatcgtaaaagaccctgttaaggggcttgccgatctcaatgagcgttttaattttctgaaagagggccagctaacctacatcgaatctttgcgtaaaacaaaaggcgagacggcagcagcagatgcggcgacaaaactgtttgctgatactatggataagcgccttaaagatatcgcggacagtgcaacgccactcgaaacgatgtggatggatattaaaaaatgggcggctgactcgtggaagtgggtaggcgatcacacggtaggggcgctaaaccttatcgttgacacggtttccgcaatcatcaacacgatcagaaagctgattgccgacggcgacgccatgatcgcgcagttcatcgttgacgctggccgacagctacagaagatccccggcatgggagactttgggaatgactttctggcgcagcaggagcagttaatcaaggactcgaaagccaaatccgccgagcttgcaaaaaccattgcggaacagcaggcaaggatcgcaaaaggcgagatgggttacattgacgccgcgaaggataaaaccctttccggtgggtacagcagcaaaacgaaggatcgcgtaaatcaggaagaaaaagatatcctgaaaaaccgcaacgccaggaagcagcaggtagacgcgggcgttaaaattgatgagcagtatcaggctgaactgctatcgctacaggcgcagttaaaggttttgcagcagcacaaagggcttgatgacaagatcagccagcagcgcaaagactacttcgagacggttgctaaattccaggttttggaagaggcaagccagaagcgaaaactgacccaaagcgaacagcagatgctggcgaacaaaaagaatatcctgtacatggcggagcaaaaggccatcgtgggagatcagattgttcagcagcagagattgaacgccttgcttgacaagtcgaccaagtatcaaaaccagatggcggagaaaaccaaagcgctacaggataccgccggaatgggtagcaaggagcaggagagataccgggccaatgcgcaaatggcggctgactggaaaaacaacggcggatctttaagtgaccctggatttaaagcgatgcaggccgcaagcgataaattctacgcacagcaagatgcgcaaatgatgaactggaaggccgggttcactcatgcgtgggctgatattggcgacgaagttaatgacgtatacaccaacatcggggatatcactaaaaacacatttaacggcatggcgagcgtgctgactgattttgtaatgactggtaaagccagctttagcgactttgcaaagagcgtgatcactgacattaccaacatgcttatcaagatggcgctgtttaactcgctttctgccgcgtttggtggtggcggcacgttcagcttcgccaacatgttcagcaagggattttctggtggtggctacactggcgacggcgggaagtatgaaccaaaaggcgttgttcacggcggggaattcgtattcacgaaggaggctacgcaaaggttaggcccggaaaacctgtaccgactcatgcgcggctatgcaagtggcggcctggttggtggtaacgcaagttccggatctggaatcaccaacggcggcaacgtcgcagcgtcggcggctatggtgttcactatcggtgacattaacattacgatgggttccggtcaggatagtaaggggatggagcagggcgtaaggcagatcgtgaacgatatgttcaccgaggctttgagccaaaacgggcgcattgcgaagttcgtcaatgagaaaacgagggggtagtagtggattcctttaaatggtgtacacaaattcaaggaggggcggcaaaggtagccgtctccaacaacattcgatcgatcagtttcggaaacggctatatccaaacggcgtcgagcggcattaacaccaagcgccggacggttccgatcgtttatggcggttcagattgggaggaggtttataacttctgtcaggatcacgtaaccaagccgtttgtgtggaaggcacctgatggaagaatgggcgtattcgtcgtaactgccgactccgttaaccttgcgccgcatggtggcggcgtgtttgaggtaactgcggagttcgccgaacgcttcacttcagccggataatcaaaagcgccctttacgggtgcttttttttggcctatgatctggagtcaattagaggagggcttacgatgacagccaacatttcaaaagagtttacgaactgcttacaaaaacttttccccggcgagatcctgacgctgatcgatatcgacgccacaaagttcggcgggcaggtctaccgattccataacgagaacgtcgcctatacaaccgaggagcttttagcggcggtgaacggcgggacgcttcagccaaaaatgatcacgtttcgcggcgagcaatacggcccgcgcccgttcggcctgggcgggatcgcaatgtcgagcgatggcacagtggaaaagccaacgttgacggttagcaatattgatgcgcaggcgagtgctcttattcgcgcctacaacggcctcatgcaagccaaagttacggtatgggttttggtcaatgaattgctgcaaaacgacggcagtgttaaagagggcgattttaggcgatttgtttactacatcgagcgaccaaagcaagtagacccgcaaaaggcaacgttcgaattaacatccgtgtttgatatggacggattgatgatcccggcccgactgacgcaaaccgtttgctattgggcgcagcgcggctggtataaatccggcaagggctgcgactacaacgggcagaacggatacttcgacaagttaggaaacagggttgacgacccgtcgcgggatgtttgcggtggcctggtgtcttcttgcaggcttcgttttggcaatgaaccgttgagtttcggcggttgtgcgacagcaacattgaaaagtggaaggtaatatgttaactccgaaaatcaaaatgcagatcatgcagcacgcgaaagaagtttacccgcatgagtgcgcaggtctggtgacgcaaaaatcacgagtgcaaaaatatcaccgactcgacaacgtttcgccagatcctgagaaagaatcaatgcctgatgaaacgcagtatgcgctggcatcaatggagggcgagccgatcgccttcgttcactcccacactggcgatggggcaaccacaattccgagcgccactgatttatgcttttgcgatgagtctggcttgtcgtgggttatcgtctccatcccggaaggtgatatgcgaatcattgagccgaaacgccgacctctgattggtcgcccctgggctttgggcgcttacgattgctatggcctaatcatggattttcacaagcgccacggcgtcacactaaaagatcggcgattgccgttcgaatggtggaagccggaatacaaagagaatctttaccaggattactggcaagaggacggattcattgaaaacactggcgagcctgaagttggcgatatgatcatcttccagattcaggcggaaaagtggaatcacgctggtatttacgttggaaacaataacatccttcatcacgcgtttggcaagctgtctcgcagggatatctattctggatggtacgagcagcacaaggttttaatttgcaggcacaaggagcttaaacatggcatcacatacaaagacgattaaactatccggttccctggggcgtcggttcggtgtcttccacaaacttgcggttgattcagtcgctgaatgcatccgggcgctgtcttaccaggttgaggggtttaagcctttcatgcagagcaaggttggtttaaatatgcgcttcggcgttgtcgccgacggaaaaccaatcagcgcgaacgaccttgcgacttttgccgtggcgagggagatcagaatcattccgatcccaaaagccagaaagaacggcgggttgttgcaggtcgttatcggagcggcgattatggttgcggccttctttactggcggcggctcgctggcggctatgggcgctttttcatcggctgcattcatggctggcggctcaatggttttgggtggcgtaatgcagatgatcgcaccgcagatgggcggcaatatgcgggcgagcgaatcgcctgagaataagccatcgtatgcgttcggcgggccgattaacaccacggcggcaggttatccaatccagttgccatacggttacagattggctggcggcgcattgttcggttctggatcttacgcagaagacaacaactaattaagccattcgctttttagcctgggggcgtagcctccgggctttttgtcgtgtacaattgcgagactattaacaggaggctaaacgatgactaatatcaaggcccgtaagggaggctcaagcaagccgcgtaccccggtagaaatgccagataacctgatctcaaaagacaagatcaagttattgctggctgtttctgatggcgaggtcgttaacgacttcagtttgaagcagttgcatttcggcggcgtcccggttcaaaacgaagatggaagttacaactatgaaggcgtgattgctgagtttcgccccggcacgcaaacacaggactacatccagggcttcagcgaatcaagtgctgagttccaggttgctcgtgaagtcactcacaacacgccttatacgcttaccgtatcgaacaaaaatctgtctgctattcgctttcgcctgttatggccgcgcgtgctgactcaaaaagataacggcgatatggtcggatcggttgttgagtacaagatcgagatggcggtagatggcgcaagttatcagacctacctaactggcaaaattgacggaaagaacacgactggcggttacgatcggagcattcgcgttaacctgccgcaaaacttcacgtcgcaggttcttatccgcgtgagccgagtaacgccggatgctgacggggtgaaggttgtcgatgccttccaggttcaatcctacgctgaggtcattgatgcaaaattccgctacccgttaacggccatgctttacgttgagttcgatagcgacctgttccagaaccagatcccaaccatctcactcaaaaagaaatggaaaattattcaggttccgagtaattacgatccgattaatcgcacatactccgggacgtgggacggtgtttttaagtgggcgtggagcaataacccggcatgggtgctttatgacctgatcatgaatcagcgctatggtttagaccagcgtgagttaggaatcccggttgataagtggtcgctgtatgaggtggcgcaatactgtgatgaacttgttcctgataatcgcggcgggatggaaccgcgctatttgatggatgtaattgttcaatcgcaggttgaggcgttccagttggtaagggatatttgttccgcgttccgtggaatgacgttctacaacggggaaagcctttcgattatcgtcgataagccgcgcgatccggtgtacctgtttacggctgataacgtcgttgatggcgttttcgttcggacgttcccaagcgaaaagacgatgtacacgtcgtgcaacgtcatgttcgacgacgaagaaaaccagtacgaacaggatgttgaaccagtattcaaccctgacgcagccatgcggttcggccacaacccgaccagcattacagcgatcggatgtaccagaaggacagaggcgaaccgccgtggtcgctggattctgcaaacgaacctaagcgccacaaccgtttcgttttctactggcctggaaggtatgattccttcttgcggcgatgtgatttacgttgcagatccgcattggcaatcggcctttaacctggtgctatcaggccgcgttatggaagtgtctggcgtgcaggtgttccttgcctaccgctgcgacgcgaaggctggcgacactctgatcctgaatacagacgacggcaagccagtgcgccgcacaatcgccagcgtttcggcggacggtaagaccatcacgctaaatgttgggtataactttgacgttgcgcctgacagcgtattcctgatcgagagcgatcagcttgcagcggaacagtatgtagtaacccggattgaaaagggtagtgatgacgacgaatttactttcgccatcacggctacgcagtacgatccgaacaagtatgacgcgatcgataacggggtaattaccgatggccgaccaacttcggttgtcgaccctgattcaatgggcgcaccgaaagacttaacgattagctctttctcccgcattgttcaggggatgagcgtcgagacgatggttatcggatggtctgccgtgcagtatgcaaaactgtacgaggtgcaatggcgcaaggacggtggtaactggaacaacgttccgcgcactgcgacaacgcaggttgatatcgaaggcatctatgctggcgagtatcaggcccgcgtgaggtgcattagcggtgggaatgtagcgtctccgtggtctgaattggcaaccgccacactgaccgggaaagtcggagcgccaaaaggcccgattaacctgtttgcgtcggacaatgagatcttcggcattcgagttaagtgggctatgccggaaggagcggaagacacggcatacattgagctttaccagtcgcaaagcggaaccgatcaggacgcaagcctgcttactctgattccttacccggcggctgaatactggcactcaattttgcccgctggctacgtgaacttctacaaagccagaagcgtagaccggatcggcaatgtttcagaatggactgattacgctcgcggcatgtcgtcgactgacgttaacatcatcacagatgcgatcctggatgaaatcctggatagcgacgcgatgaaggaactacaggaaaacgcacaggatagcgcggcaaaactcaatgactacgcgaacagcatcattcaaaatgcgctggcgaatgatgcggacgttaggaaaatgacgaaggagaacggtaagcgtaaggcagagatcgcgcataccacggtgctgattgccaacgaatcagaagcgagggcggctgaaattacgcaacttaaagcgcagattgatgaagatatcacgtcgcagattacgatccttaacgaagccctggcgacggaaagcgagacgagagcaacgcagattggtcagttgcaggcagattttgcggctgatattgacggcgtaaaaacaacaatgaacgctggttttacgcaggttaatcaggctattgcaaatgaaagtgacgcgcgtgcaagttccgaggcggcactagatgccaaaatcgggcagaactccgcagcgctaaaccagaaactcgactcgtgggcgaacgttaatggcgtcggttccatgtacacgatgaagttgggcttgaggtacaacggtcaggagtatagctccgggatggccctacagcttacctcaagtggtggaagcgttgtttcgcaggtgctgttcattgctgatagatttgctatcatccgtaatgcggcgtctggcgcgtacacgctaccgtttgttgtgcagaatgaccaagtgttcatgaataacgcgcttattcaggacggttcgattaccaacgcgaagatcggtaacgtcattcagtccaacaactttcaggagaatgttgcaggatggaggcttgataaaaacggcgtatttgtcaactatggctcaacttctggcgaaggttccatcaagcaaacgaaccagaacatcactgttcgagatggtagcgggcgcgttcgttgccagttgggtaggatcactggatcatggtaaaattaatgccgggagaaatcccggcttaaccaaaggaggcagacaatggcttatggttttcaatcatgggatgcgaacgggaaccccaacaactatgggatcgtccctgtttcagttgctggatatattgcattagcgcaaggccagaaaagcggaacgtggtattacaacgtcccgcctgggttgaggcttggtttcttttgggtcgcaaatcaagaccagtacggcacatcgaagaggcgaattaccgttagtggtaatcagatcgttgtttcagatgcgccagatgatgcgctggaatcaggcgtctacccggcgacgcaaggttttattgtcgttcaaattatgagttgatgattatggcagattacggaattttacttaccaatgatagcggcaatgtttgggtttcgcctcaaagcatcccactggcactactatcaaagcagagcatcactcttaggggtggtactaactccgatgaagtaagatcggtaacttacgacacgaatcacccatgcgttccgttcgtggtctttcatggatcttcgccacaaggtgcattcacaaaaatcaagtacagcggaaacacttgcagcgttgttttttcttttggtaagcaaaacgtatatgcggaggtttattttttctccgtgttcccacagccaaatcctggttatgggcttgcaatttgggatgaaaacggcacgctgattttgaccaatgaaaccagaacactttcagacgtacagacctacggcactggttttaatctaaacgtcactaacggcgggaagtgggcggttagtcctgttcagttaggcgcgatcgttggtgttgttcgcgatccctacccaagaccatttcagggcgactattgcgcagcggcattctttaacggctcaagcacgcaacttaccgcatatctaacgcaggcaccaggaggagccgccagcgatctaacctacgtcaatatgaaaaacacctgcatcgctattgattgcgcaagatacgactaaaagaaaggggccatacggcccctttttctaccccttgagatttttgatctcctcttttaattcatcaacttgagcagacagagctttgattgcgcaaattgcatccatcaaaagagcattattgtcaagcacaagtttcttattttcaactacgttaccctcatcatcctgataggatgcgctgctttctttaacgtagcacgaatcgatatctcgcacctgctgtgcaataactcccctacgctcgcgtttcttaacatcatccttataggtgaacttgaccagattcattgctttgatgttttcgagtgactgcaaaccatcataagcaacaacattgtctttgtagttaatgtcagatagaccagcaaaaacaacgttgccataagcagtgcttgcaatattaccatctgatttaaactgccaatactgcgtattaccgccagttccccatttgctgacctcaataacggcacgatgttcataacccctatgttcctcaagccacatagcgcaacgcgcaccgttaccattaatgttgaaccgtgagataaatgatggagatttaaggatatcaccattattcccatttggatcgctagttggccacgctacaaaagcatcattaacggtactcctcacagtcccatatgacacaacacttccgcgaagatcggcagccccgccaactcgcaacgtgctcgacattgtaacagcgccgcgaagatcggcagccccgtcagcacgcaacgtgcttgacattgtaacagcattgctaaagtttgcattcaacccggtaacagcaaagttcgatgcatcaaaaacaacctgcttcgcgctgttcatatctccattagggcggaagtacattccttgaccattttcagggattgagtacacgatcgcattgctgttatttgccctaatagtgcaaccgttcagggtcagcgtggcgtttcctccaggaacgctaattgcctgcggctggctgaacgtgttagctacgttggtgcgcgggatcgtattatcattagccatcaaatagtcagacggtgaattatatacaattccagaaggctccgtgtcaatccaggtataaccagtgcgatcaatgattggccccgtaatcgaccctttgttagcctgtacgtttacatgattcaaccacagttcaggaacccatccgccgggagcatgaatataaacatcaaacgaggagtctgtgtttttcaccaccccaagattaatgcgtctggtgtcgtttggtctggcagcaatcagggtgcgctgagtaaaccaagtgtcaatattattactggttagcgtatcgggaagaccgcggccagaaatcgaaaagatatcaaccgggagatttgcagtgccataaccagtacctccgccaatgatgaactgagcaaatgcgtagccatcaccagcgttcttgacgttggcgatcttcatccacttctccccagcgaaagtgccagtaattttatccggcacctggacgccagccacaaggtcgacaacctgatcacgaagattttgcgtctgccccttcgcagtttgcgcgtcgttcttcgccgagttggccgcagtttctgacgcttttgcattggtctccgaggttttggctgcggtttctgatgcctttgcattggtctccgagtttttggccgcagtttctgacgctttggcgttggtctctgaggtcttcgctgcggtttctgatgcctttgcgttagtctccgacgtcttcgcagcattcttggatgcagcagcattggtctctgaagtctttgcagcggtttctgatgcctttgcattggtctccgaggttttggccttattctccgaagatttagcgttcgtctctgaggtcttcgctgcggtttctgacgctttggcgttggtctctgaagtttttgcagcgctttcagacgcagccgcagccgtagcgcttgcgcccgcagcttcggaatctgccctcacctgatcggcaagactttgcagagcttcgaaatcgaagttcttaaagaagtcgacagcatccgcaatttgagtttcctgtgactggtagtagcgcagagtttccgcaacatcttgcgccagtccgtcaacggtcagcgagtcacttaacaggatcgcgtaatcgctagacgctacgacagcgccttttgtggtgatggctttaatttcagtatcgctaaccaccttgtttacgacggccatttgaattggtgacgacaaaaacataatcgtcgcaccagggcgaatcagcgaaagcgatgattgccattttgtgccagtcccggtaacggttccgtctgcggccatagccgctttgccttctctgtatagtgccatgtttttaagcctcattggttgattgagtaacgcagataatagcatcaatgaaccgataaaaaaaggagcctttcggctcctttagttgtcaaattagaacgggatatcatcatcgaaatccatccccgcattcccgccgctgttttgcggcttaggcgcttgttgcggcttgggttgttgaggctggccccacccggattgctgattgccgccgccgctttgcgaaggatcgcgctggctgaattcgagttgcggcataatcatttcgttgtggctgtaaattgtgccgttgtgctcgcggttaacgatctgaagcgtccggcaggttacgctgatcaccttatccatttgcagcgcttcgtcgtaccacttaatcatgttttcttttgcaaagaaaactgcgcggtagttcgtgtaaattgtttcgtcctcgccatcacgattgcggatcttcatccgctccgacaggtctacggcgtacattttccacggcccgttattgttgctgccctctttgacataaggcgcttttcggattacccctgttacaacatgcattgtcattcctatggggcggcttcccgcccgttaaattagttgaaagatgaaatatcttgcgcttctggttcaggttttgattctaccttttccggctcgcgcttcgcaacctcttgcggtttaccggggttaaatccgtttgccggggtgactttcagttctgcctggcgtttggtgatatcgtcttccgtcattttccactccgccggggttaacgtttgtttcgccagcttatagatctcacgaagcgattcgagatcttcgcacgcgtcaatgcgttttttgaagtctttcggtgtcattttcgtaatttctgcatcatcatccgcctgcttgatacctagcgctgcggccagcgcataacggcgggcgtaagatgttgttgagccgtatgcttgttcgacggttttactgatcggcatattgtactgaaacgccatgaactcgccgctttcatgcaaaaacatagtttcgaggtgcatcaccttttcggtgctcgtatccatcatggattgaatgaccataattttgttcttctccagcgccggggaaatagcgtcgaggatatccccaagattcgcataggtgttcccaagatggttgttcttaccgcttttctttgcggccacgaagccagattttgccttgattaatgcggctgcgatggtggtaaatttttcagatgtacgcatgataaagtttccttttcctaattggtaatgcgcactatatcacaagtgcgcaccagtgtttagctatttgtgccgtatacgtccgggaacatgtatttcacaaactgaggagtcggcaaaacaacttccgccgcgtttgactcatatgatggccatgaatcgtgcttcacgcattcagcatactgatgaatcacgctttgatactgtttgcgaccgatctcgatctgctggctggtcagggtgaacgccagcggagcaaacggtgattttttctcctgcgttagcagtctgacaactaccgggcgtttttcgttgtaagtcttcacgaacagatcgcgctgcaatgccatcttgagatagtagcccaagttgaaggcgagtcgcccgaaatcgtcaggcttggaagattgcgtggttttgtagtcggtaatcaccacgacctcgaaaacctcatccgggttgaacccccactccttgatgagttcgggatcggaaacaacgtcaacatgatcgagtcgaaccttaaccttgacgccgaagatctcaccgaagattgacaattcacgctgtgctgtaggcgattcgatacatgcggcgtgtcgcgggttagccagcatcacgctgcgcatttgaacaacggcatcgaaatcaacatccttaaccagcttgcgcccggagtttatcgcggcgctttcgtcgcacagttcaatagcccaccaaacatttacgtcaatcccggcgcgatatgccatttccagaagttccgggtaatccttgttggacgtcccaatcaggccacacgctttcagcttcgcagacagtgccgacttcgacgtaatcagatctttaacctcgcccggagaagtcgcccgcaggtactcgccattaaactttgccgtctcaagcatacaggtatgcgaacaggttccgaacgccagcgcggctgcttcctcacgcactttgaatttccagtgcgccggggatgttgcgtaaatctcgccgaggcttgagccgctaacgtattccgcgcaccaggagttaggatcgtggtaatcatcgttggataattccgcgttggtgtatgccttaaaaattgcttcagccattggtatcactccatttgtggtttcgttgcgttaagtatacgcatgacgattccaggcgcaagtcaaaaagtgctatccgcagttggttaaaaaacgagcgaaatttacgtaagatttagtaagatgcatcttacgtgatttttcctatatatttcatttagttaatgcaaatcggtaagatggtaatatccctataggtaaatatccatgaaaaatatggcgcgaaatccagcgaaaaaagacacgcaccccggagaaatcttaccaagattgatagatacagatagagtaataataataatattgttatttatcatatacttactatctatatattgcggttaattggttaaattttgcgcgaaatttacgtaagattcatcttactaaatcttacctaaagtggttcgaccagctgcaagccactgaatttcaggcataaaaaaaggtaagactgatttgctcaatcttacctaaattctggtcaacatttaatcatagaagcgacgatgccctgtacaacttgcgttcaaatccgagcttaaagttgtcaccgttcggaacgataactttaagatcccgatcgtcagcagccgccagcatatcccgatctccacgacggcaaactacccgcatttctcgcttaccttctccgccattgcctttatacctgtacgccacgatctcgacgtttgaaggtatgatgcaggcccaaacgtcgcacttgaacgaactggcaatattaaagtgcatcgcctcaatccaggatcgagcaaggtaaatcggcccgttaccgtcgtcgctctgattggtcactatcaccgatccgaatgtcagatcgccagccaacatcttctcccgaccctcctcatcaatgaacagcatgttgcaatactcatcatccggcccatcctcatgcactagttgcattggtagcgcgtgaattagctcctgtctgcagttctcgtgagtttttacgccaaccagatatgatttgatatgctcattttcaatgccctcatagagcgttacaggcgtgctatcgacggcctccgttctgtttaaaactgccatcactctttcatgatctgccatctttccgtagtcatacccgttatcacgagctacctgcttgtttctcttgactacgtattcttgcggaacctttccgagatagcgcccaagaatgttgatgcactcgctatacggctggccgcttaacttcattaaccagccgatccccttatcggcaccgcaaccgccacagtatgcgccgccatcacctcgcgtttccagcttgtcagtccagcggaatcggtctttgccgccgcagttcgggcagtcctggtgcttgccgttgaagtatcgagagtggatgccgcaaatgttctgcaacgcctcgcgccacatgccagccatgtacggcaaaacctctttttcatcgtaaaaatccacgtcgtaacccccaaataaaaaacgcctacacgagaatgataacccggcaggcgtttagtgtttagtcaaattgtgctatcggactacgcggagcatttcgcggcggtcgcatcggcgcgtcactggcttgccgttgctgtcaaatcttaaatcaggtcggcagaatgaggcgcgaaaacctttgcaattgttccgtcggtagctcttatgtactagataagcgccatcggctgagatcataccgcgcttacgccactgctgaacaacctggatactaactcccaactcttttgccgttccagcgataccaccgaaggcatcaataaccagctccatccgcgcagtcaacccagctcgaacctcatccttcagcacgtagtaaccagtcggtcgcttgcgtttcttcttatctttcccgcgcgacgttccgttgttgccgttcaaggttcgcttatcaaccattgccatttgctccataattcaaccctcatagcattttttgttaaacctgataaaatgttccatgtattatacacgcaactatgcgaatgacaaattaggattgacaatggcaagcacagaagaagacgtagcatattttaagcgactatttcgttatgaaggcggaacactgattcgcaaagttacaaccagtagtcgtgcattcgctggagactccgtagggtgcgagaacaacgttgggtatttacaggtaagcgtaaaaagcaaacccctatacgttcaccgaatcatttgggaaatgcataatgggcctatcccagaaggaatggagatagatcacatcaaccaggtcagaacagataacagaatcgaaaacctgcgactggtaagccaccaagtaaaccttaaaaaccaatcgatgaacagtggcaatactagcgggcacgctggcgtaagctggtttaagcgaggcggtaagtggagggcaacaataaaggttggcggaaggcaaatacacattggttacttcgcgtcgtttgagtcggcagttgccgcacgaaaagcagcagaaaaacaatatggttttcatgataaccacggagcagagaaaaagaaatgagcttatcgattgagcaacaaatagatctatacgcagacaaaatcccggcaatccaaaagagatttaccgttggaaatatcgttccgtatccatatcaggctgtggcttatattgagacagccaaaagaatagcaaactacaccgcaccgttttacattaaggcttcggtttccgccgggaaaaccatcatgatcgccatgctcgcagcgcagtgcaaggcaatgaacttacccatgatggttcttgctcgccaggccgagatcgtgaagcaggattcagaggagatcagtaacctcgacgttccgaactccgtttattgtgccgggttgggcacgaaggcggcatacttcccgatcgtcgtcggatctgaagggacggtggttaatggtctgtttaaaatgctgggtgactatacaccttcagttctggctattgacgaatgccaccaggttgactggcaagatttggcggaggcgatcgccaacaatgaatcgttcgagtacatgagcagaccgaaggataagccgtatcgcgtgaacggtgaactggtcgatgccgaccacccatacgacgaaaaattcgactacgtagaattcggcggcggtcgaacacagtacaccatcgtcatttgtgagttaatgcggaggtgccttgagaagacagggcgagaacttcgcatcgttggctatacgggttcggagtttcgcggcgtcattccgattttacaggaagacaagagccagcctggtttttggcgcgagcagatcaccgacattaacacaaactatcttgtcgagttcggatcggtggttccgacaatttttggtgatactgaatccgaagggttagggtatgacctgtcagaattccacggttccagtcaggacggtacgcaggattttagcgcggaagaattgcgcaagatggaaaagaaaatccatgaatccggcgaaatgacgaagctgattatgcaaaaggtcgtggagcgtgcgaaaacccgaaacggagttctgataacttgcgctggacagcggcattgcaaggaggcggcgagctatctaccgccggacgcaacatacgcgatcatcaccgaaaagacgaactcaaagaaacgcggcgaaattttggataaggcgaatcgcggggagattaaatacatcttccaggtgatggccctaaccactggcgttaacgttccgttttgggatttttcggtgatattgcgcaagatcggatcgcttacgttgcttattcagcttttggggcgaggtatgcggcttctaaaggactggcaaaaacagcctccttactcgtgggtgaaagaagatcaccttgtctgggattttgccggaacaatggatgaccttggccagttgtatttcgatccgattttggagcaggcgcaataccaaagacgcaagagcagcaagaacggccccaaaatttgcccggtatgcaagggagaaaatagcgagtacgcccgccgatgcatccacaaagacagcaacggcaatcgttgcgaatatttctggatatcgcagcgctgcgaagaccagaaagacccgcgaacagggaagattaaggtaaaaggttgttacgccgaaaacgatattgttgcccgccagtgcagatgttgtggggtgcagcttaaagatcccaacgacaatctcaccgggaagcattatacgcagaatgactggtatgatgttgtcgggttcgatatcggcttgactcgcaatcagtccgggatcatcttcaattacgtgttactgaaccatgacggcgagcggttcaccgccagggaaaagttcttcccggaatcagagaatcagatttgcggcaagttgtggcggcaaaaggcagtctcccagcacgttgacgacgcggtaatgcgtggcaagttgggcggtatgaaaaacgcccgcaagatcctggagtatgcggaatacttccgcgcaccgaagcgcgtaacgcatcgcatcaacggcaagaaggaagatattatttcacgcaaagattttggagacgcagaatgatcgcagataaaggtgattatctcgaatactacggcgggcctgtgaaggcttgtccgcttgagaaaatcgatcagatgaatagcgtttcgtggctgcggcacgaataccctgattatctgttctggcacacagtcaatgaaggcagcaagcacaaggcgagcgcggttatcgatcatcaaatgggattgcttaaaggcgttagcgacttcgttatcctgattggtttcggtggcaaatacccgttcgcagccattgagctaaagcgccagggtaaggcgcaggcgtcgccagtgagcaaggagcaaagggaattccttgctgccgcccggcgtcgcggcggattcgccgccgtggcctatggcttcgagcaattcaagattgctttctgcgatgccataaaatagcactttttgttaaaaccgcccggcgaaagccgggtatcatttccacatcgaaacgaagaatggagtgttgaaaatgaaaaagatgctggctttagttgttctgtctcttggtcttattggttgcagcgaaaaaccgaaaacatatgattgcggtggtgaagcgtttgaggtaactagcaactatatgaaagttgtcaagggtgaaaactctggcgttataattgatggcgctggcgaaaatcaatataaactgcttactccttttgggtacgctcattatgcagtcaacaaaaacactattgatgttagcgtgggcgcttttcacaataccttaacctgcgaggttaaataataatggcaaaagatatcgcagacaaagacactcatgacgcattcatcacgtttgagcaattggagcgcgaaacgtttattggcaacgcccttgccactggcggacactatcaagccgtcaggccagataagttctatcaggtaactggcaaccgatacgcaggtagtaaaacgccggatattgtgcgcgacaagtgggcgacagatcgaagtctgatcgcatacatggaagagcgttacggcaattacgatcttgatgtcgccgcagaccgaagcaacgcagtttgcccgaagttctacgacgaaaaaacggattgccttaaacgctggtgggggaaaaacaagcacatttggctgaatcctccttactcgtttccagatccgtttattctcaaggccattgagcaaatggagcacgacaaccagatcgacattctgctacccggcgacaattctactgcctggttccgtgacgcgcagaagatggccgccgaaattatctggattgttgccgatgttgaagaggatgattacgggaacaagttaagtcgatccggtcgcctcgccttcatcaatggattaagcgggaatccagtcgacaacaacaataagggaagtgttattttcatcatgcgcaagctcaagccgggagaggagcaaaagacactttacattccggtaagcgagatttgcccgtcattagctaaaaagcgtatgcgcaaacgtgggatctgaaaaatggaacagacagagtctttcgccgagtatcttcggatcgttgttgaacttctggacaagcacggcttcattgggacggatgaggaaaagttagcctttgctgacaccatcgacggaacctacatggagttcatggacaacggaaccccggtcgctgactggccagaaattcttgaacgagaattgattgagtttaaatcacatgaaggcgcggagtatttcgcaaaacagcactaattgctaaacaatacccgccgcgtgcgggtattattactccaccaaccaatcaggagcaaacgccatgaaaaccaaaaccattgcagacaccatcaagatcgtaccagtaaaagcgcaagtggtatcgcgtcaactggttaacctgtctcgcctgtgcatggccgactacatggcgaacccttcagataattgccttgatggtgtagtcggtgagatttattttcgcgctggttatggactggaaagcgtggccatgtatgagcaaatggccgaaggtttttgcatttacggtgacgaatgatgattgtcgagactggtcgcgctgccgtatggcagcacgcaaaagaagcgggaataagtgatgatatcgtgaagatctcaaagtatttcgatatcaaagatatatcaattatctttggtgggaagctcacctatctaaacgagcgcccggtgaagcgcacgcgaatagcagtggcaacgcgtgcggaggccgacgcgctgaagatgttcatacatgagtcgaaacagcagaaaaaatattacaagtagcgggggcgtgaagaatgcgatatattgcgatcctatttacggcgatcctgttcacgatcgcaatcatgaactgcgcaattcaattaggataaattatgttaccgaaaatcacagacgaagaattcttagccgcccgcgaggaaggtaagacctaccgcgagatcgcggaagagttcggcatgaacattcgaagcgttgaacgtcgtggcgttcgcctggcacgacaaggacacctacacggaaacgcccacgtttcgaagcatatcccggacggcttcggcgtcaaaggcacgtcgacgatgattcgcgcggacggctccgaggtcgttcggtgggtcaagtcggaagtagacagagatcgcatggtcgcgcttatggaggcggcgcaggcggctttctgcgaagaccttccgcgagctgaaccgcaaccgctggatgagtcgaagttctacattgaagatcagcttgccctgtacccaatcttcgacctgcatattggggctatggcgcataagcatgaatgcggcgagaactatgataccagcacggcagagaaggttctaaaccgcttctttgattattccgtgtcggtggctccgcaatccaaaaaggctgttttgctggttggcggtgacttccttcacagcgacggcctggacgcagtaaccccggcaagtggtcacgttctcgatcaggacagccgatacgcaaaacttgtttatgttgccatccgctcgctgcgtcgcgccgtgtcgctactgcttaacaatcatgccgaagttgaagtgcaggtaatcgaaggcaaccacgaccaggccgggatgatttggctacgcgcagcgctggcggcgttctatgagaatgaaccgcgcgtttttgttgatgttagccctgcgatcctgcatcgcaccttgtggggcaaaaccatgctgggctacacgcatggccacacgatgaagaagcctgaaacgcgccttgctgcgatggctaccgacttccgcaaggagttcggccagtgcgactacatttacacgcattccggccactggcatcaccagactgtaacggaacactcgttaggtattgacgaggtgcatggccagttaggggccaaagacgcttacgccgctcgcggtggttggcgctcctatcgccaggcggcggttattctgtacagcaaagaatatggcgaagtaggccgctttatctaccgcccgaacatgtaaccacaacggccccgcgaggggccaacaaggaaaaccgatgaatagaaatatctgcattttcgatctcgatggcacgttgtccaatggcaaccaccgcttgcacctgctgccgaaaaaggatctccaccttacagaaagttggagtgaatttaatggtgcatcaattggcgacagcccaatccaaagcacaattgatgtagcgaatgcgcttcatcgctccgggatgattgtcgttatcctgaccgggcgatccgatgaggtgaagaccgaaacaatgatttggcttgaccgttacggggtgaaatatgacaggctcatcatgcgtcgcgccagcgacaaccgtaaagacacggtaatcaaggaggaggagttacgcaaaatcggaattgatcgcattgttgcggcatgggatgattcacccaatgttattgcgcacttgcgcggcctgggtattacgacttaccaggtctgcgactacggagacaatcttcaagatcatttaaaatcgcacggagtagacaaatgaaaaatgtaattattctcaacggagcacccggaatcggaaaagataccatcgcggaaattatctcgcggaagtgggaatacaagaaccttagcttcaaacagcctatgtttgccatcgcgcgtgctgtgcttggatctactgattttgcacgctttaccgccagataccacgaccgcaagcacaaagaagtgaaatgcgattttttgggcgaccgttctccgcgtgaattcatgattcacattagcgaaaacttcgtcaagccgaccctgggcaaaaatcagttcggcaagttgctttgcgattcagcgctaacttcgccgtttaactgcatcgtcagcgacggcggttttgatgaggaggtcgagcacgtcgcagcgcatgaggcgcttaacgtatttgtcgtccgccttcatcgtgacggcatgacctttgagggtgatagccgcaaacacattcgacgacccgatctgatttgtgacacgtatcacgaacttgattttgatatgaccactggcgagcctgaagacgacgcgcaaaaaatccttgatatggtttcagatgttgcattaaaattataaagttaatgcctttattatcaccaccttaacgattgggaaccttgacgggttcccttttttttgttcttaattttgccaaatgaatatatcatcaccttaccatttaactaacagaggttgcatatcatgcgggaattcatcaacgcggcaaccaatagcagcggcggtgttgcccttgcgggatctgcatccgggcaattaatcattgctgccattggtttatttttcatgatcttatttggctcaatcggcacgtggctgaagtggaaagactcaaaagccatccgggaggcgattgattctggcgacattaaagaggcattgaggatcaggagcaaataaaatgggaatgaaaacgcggcttactttcgcggcggcggtggcgatcgcggtcgcgttcctccccgaagtggaggacactaaatacacggtttatacggatatcgctggcgtaccaactgtatgcgaaggaatcacaggcccggacgttatcaaggggaaaacctatacccggtcagagtgcgacgcgcttttaaccaagcatatccaggtagcaaagcgaaccgttgacagcaaaatcaaagtagatgttcctgacaccttcagggcgtcgatgtacagcttcacgttcaacgctggcggcggcgcatattctggcagcaccatgctgaaattaacgaaccagggccgattgcgcgaggcgtgcgagcagctatatcgctggacgtactaccgcaacccgaaaacgggtaagatggagaagtcaaaaggcttgcataatcgccgggttcaggaatatcaactatgcattaaggatctaaaatgattaaggtaattggtgtggctcttacggttgttcttctgtctggttgcgcttccagtgtcccgatcctttccgatctggtgggcagcaagccggatatgacggcgcaagtaggcgcggagaacgttaaacaggcggttggcgtgacgaacaaaacggacacgtcaagcaagcaggagactacgttcaaagagtcggcggtaggaaaggttgacacgtcgaacaaaaaatccgtaacgacctccagcattcacgccaaccagatcacggcggacaagatcgagatccgaaacgatgaaagcggaagcctgactccgtggctgattggtggtgttggggttgtaatgctggcgataggtgcgttcggtctttggcgggaacgaaaaaacaaaggggcgtaatgcccctttttctatatgtaccgcttgacgtgcaatagcgctactccgtcttcatcgttaagaccatgttcaaccgtgttggttgcagccattccttgatagagcaagatgagcgcggcacgcaagtaattttctggtgtgatctgtttcacacaaacaagcctgtgaacttccgttatcagatcttccacctggtttcccgaaaagctgttcatcactgagttggtcaaggtgcatcatctcccatatgtatcggttatccatcccttcgaacgaccggaaatcaaaacctatttccctgttatccggccccgtacaccacacagagccgttttttccgtcaaggtatccattcgtatagcttcgcgctaaaaactccttagagaccattgaggcgaacatacgttgcgatacgttggcggcttttgccagtcgaggcgcttcgcggtgcgtatagacgaacttcgcaaaatcctgccgggtgaactcccggcgagattcgcagaacttgtaaatgtcaagaataaacatcaattacctcatgaacgacgggttgataaagacttcggaatccatcacgcagataaagcctaattcctccatcttcggcaataagcgttccttaatctttttgctcaccccggcctggcctttgaagatcttcaggttgcggcaggcgttataaatgccctggacggtcataacaccttttgcctgtttgcagcgactggcgataacgtcatacatcgctttaatttccgctccctcaccagcaaagccggaagagtcagccgacgacaaatacgttttgctcaattcatggaacataatgatcgcttcgtcaatggtcgccgtgtcgatcttcttcgagcgcttcccgccgggttgccagttccggatcgtgtgaatcacggacgccagacgcataacctgcttatcaaacttacccatcgcgccgcgaagcattgtatgcgaatacttgccgccgtcgcctaactccggttctaactcctggcgggccttgttcagcctacgcattgccgcgtcagtaacctgcaacttaatgttcgactcgctcataatgtcatgaatcagccggaagtaatccgccttcagtgactggtcgatcggctcataggtcgaattcccgttttcgtcgatgaacacgcgttcacccaaacgggtttgctcacgaaccaaaaggaagcgttcagataccccgatcccgcgagagccggcctgcataatggcgtcgatggtttcatcctgggcaattacgcaaatgcagcccaaagcctcgaatgacatattgttgctaacgtcggcacgagcgatcgatacgtggcctttatcccatgctttgagcaccagttcgctgttcgtcttcttaccgccatcgtttccatacgtgatccctaaaaggctgttaaccgccgtcgcctcatcggaaataacggcaaagtttccctgtcggttgttaatcttcgccagaccttccggggtggtatcagataccgggaaagttaggtcacacaatttttctaacttctcctcaagttcgtcacggtcttcaaaaagtttcaccatatcagattgcgataactccccttttagcgcctgcttgttggcggacagcttcgccatgattttcttacgctctttctttcgagactcgttaatgcgttcgacttcggcgacaataggatcgatggcaagcgagttaatggcagacttaccagcggaaggcggctgcgacgtgataacgtaaagcgttgtcggttgctcgctgccgtggtactcgacccaaaagcggcccatcatcgcggcggatacggttccgagaaagtgcatgtaagcggatgattccgggaactgaacagaacgcgctgcatttagcgccagcttgccgacaacatcataatcattggcgatcgagattgttggatacttatccgcgtttacgtcgatatctttgggctttggccagaatgaaacggagtcacgatacccgttcgcacgaatcgcaacgcgcaggggactgatcccctccctttctgcgatggcgataatatcttgcggtgatacgcggtcatttaaaaacatgcccttgctcctgattggttaatcgttcggctaatcatatgccgtattaaatccgagatccagtgataatctaaacacgcttgaaaaacgcgcttggattatcggggcgcatggccccgaacccgtcacaggtatttagcttcgaaagtcgttccgtccgatacactgaagccaacttcctcgcggtacagcgtccagcggcatccatcacgatcgaagatgtatccggcaaccgcgccgagcgcacgaccgctttctacctggtagcgcttgccgacgctgaaggattttttcatcgggttgctatggtcaaggccgacgcattttagcgttttggtttttagttcgatgaacgtcgcaatcacctggccaccagcgccagcaataaacaactcgccgctaacgcctaccgacaaaataacgcgcttcttcttcagttcgacgctgtcatataccatcattgacacattgccttcatcgtcgacgcgggcgggataaaggttattttcgtgtatattaatagcgcggcttgacgtgcatttaatcttgattgacttcgccatttattttctttctccgatctcgatgtacaggtttaccaaatccagaaagtcagccttgcttttgcaacccaacttaaagccaacgtgcgactcaattttattttgcatcgcagccagtgttgcgccgccattattcatcctgagaacttcgcggcatacttcggcgagcttttgagatatcatttcttcaccacctttatttccatgccttcgcaagcgctcttgatatcattaatcagacgattaagccttaaatcagtcattacatggtgatgacgtatatcaataattccagcaacgactaacagcatgacggcaaagataaaaccaccaggcccggacatacacaaaacagttaacatcatcaagataataaatttcatttccgttttactccgttgcgtttcgatggggtgattctacccgactttcgccgggtagttttagaaattcgtgctattctcgataattcgcctggaacacggcgcgggcaaaacctcgcggagtaatggaacgcagcattttagtcctttctgaccttccacccaaaaacttccaggcccaaaagaaattcacgccttctactccatccggcggcgtgagccgtttcggttcgacaaaaccgtttccgtgccatatgcacgttttcttcgtgtaattgtcacagtggggcattttgggatgccacacaggctcgttcggagaaacatagccaccgaagtcgcgcggatggaaataaaaatccggctttcgccatagtgacgataatttcccgaccgggttttcgaccatccaggggcaaccatacttattgcctaattgctcgaccatcttcgcatcccctgctgcggataatacgtcattatcttcccttacgtgcttgattccgctatgcgctaacagcgtgcatggcgggaaagcgaaaatgaagtcaggatctggaatgccgagaatcgatcgcttaacgtcaaaatccttgtcaatccaaatgttaacatactggatatttgggtgaaccattcgaatgctatattctccgtggtcgccggagtcggcgttgaaacagtacaccttgcatcccttgatggcccacggcaggcccatgatgccggagccgtcgaacatgcagtaaataaccttttctttcatgctttccacgcctcaatgaacattctgttcgattccagcgtcagcgtgacgccagccagggaggactgaatgagacgaccgcccggaaccgtcccgatgatgtagcggcctttcgacttcgtgatcgtgatctgagtgaagccggaggcgcggttcatgcggagaacgacgcggccatgagcgttcaggacggcgagaatggaatcagtcttcggatggttcattgtgtagctccttcgtttgttggtatggggacagtatgccactatcccgctgtgttgttttagcaaaacgtgctattccggaacgcaggtcgcgtaatcctggctgatgtagatcgtgcgctgaacgcgaggttcgagatcaccgagttcctggatggtaacatcgttgcttcctacccggcacggaaccgatccgaaaataaactcgccagtctgcttgtcgttgatttgccatacattaccgccttcctttttgacaaccaggaaaggcgcactgtctgcactgaactcttccgggccacgaccgtagtaatgcgtgatcgcagctttggccgcagcgctgaaggcatcggtaacgtcattggtcgccttgtctcggatggccttgatacgttcttcaggcgatccgatgatgtaggaaaagctgttcgaaatggtaactgttcgcattatattttaacctcgttttggtggatgaagtcggcgacgtaatggcattcgatcgggttctcgatacccgccagcacctcgcaagacccgttattcagtagctggcaatgctggcactccgcaccgccaacactggcaatgacaatggcgatcccgttgcatgaaccgccgaacattcgatgagggaagtggtaagcatcgcaggtgcaaaccacctccccggcccgccgtttcctcatacctggcccttctcgatgcagaaaacccaatcacgagcgtcaaccgcaaagcgtgcaacgccgtcgagcaccacgaagacagtaaacccgttgacgccgcgacccttctcgatatcggtcacggtgcggaacagatcgcttgcgccatattgaattttatccccgacgactacatccgcaaatgctttcatggttaatctcctgactggtttcgatgggttaactataccaggcctcgcggcccggcgtttagcaattcgtgcttatttcactgctttcttcgctgccttgtacgcctctttgaaagccggaacatcttcgaccggaatccagaagccggagccatagccatcgtcatagcaagggcattggtcgcagtagtcgccccaggttttctcttctccgccgacagagaatccagtgggcattttgcataacgcttcctcaaccgcttcgatcttgtcggcgtcgctatccatgataacgaagttccacttgccgttatactcgctgcccaggttgattgattcgcgttgaagtttcatagctttagcccctttggctcaattcgtttcgttgaagtcatcatagcaaagccgatcggatggattttaacaaaaaatgctattcctgcgattgctgattattccaccgattcggaatagtggaatagatggtgattgcacctgattccctggtgattagttttgacgaatcatgattgcttttgattgtttcattttgtgcaacgattttgtgagtgtttcaggatttgcaacgaattgcataaatgtatgcaccatgcacgcaatttgccgatcgaagccagcaaaagcgccaggtgtttttcgccaacatttacgtcgtgtggaaatgtgggggaggaataatcttacctaaaaattgcgcaaaaagtgaccaacataagcctataatagatatataagtatatgataaataataatattattattattactctttatctatatatatgtttggtaagatttcttcggggaggttatggattcctcttgcgcaagccatagtttttagatgttccgccgcgaaaaaatgtatatagggatatataggggatgacagcaaatcttaccaaacacgcttaaacccttttacggcaaggcttgcgggtggtaagatgacattcccacacaagcaaaaacgacgtaaatgttggagaaaaacacatgcaatataaaggctatgagttcgaagaagtcgacgtgtccgagtggatgcagtacgacgcagataagcaggcagcttaccatgaatggctgcaatccatcacgtttggcggctcaccaggggtagacgatcggccagttgctgaaaagtcacccgccgcattcactggtaatcgttcgtccgagatccggcgcatgttcctggatggcgggcgacgtatccagatgacggcggaggagttcgcggataagttcggcgttcatccggtcgacaaccatttccgcaggccgttgctgaaactcctggagccgggagaagtgttgcgggtgagcctgggggcggggttgatctccgtctttaccgagttcgacgcaatgactggctcaaacatggaggctgaggcatacaggcggcagggcgctatctccgagagggaaaggattaagggtttagtggccgctcttgctgtagactttgccggacatgccctggccgggatttacaaggcgaacttgttcgcggctatcgatcttggattgaccgccagcgatatcagccaggaagcggccaccacgcaatagcactttttgttaaaacccggtcagagcgatcgggtattgtctttccatcgacaacgaaccgaggaaaacgaaatggtcactcttatcacatgggaacacgaaaacagcgagccagtggtgcgcgaattcgagaccgtagcggcatgttacaacctggcggcaaatggtggcttttacaaggcgcagatcgttaacgagttcggggttgttgattatgaattttaaggcgagcgacgtaaaacctggcgtggtctacggatcgcgcctcaataaccgcctttggcggtgggacggcgaaactatgtggactaaaggcgagggcgatgttatctggcatgaatgcggctggccataccccaccatgagccgcctcgatatcgcttattatctttcggttggcgatatgcacgagatggaagatagcactttttgctaaaacactgctgtcgagatccggtattatttattcatcgacaacaaagaggagatgaaaatgagcaagaagaatccatattcaaccagcaactaccataacgaacacgtcatgcgctggcactggcagaaactcaaagaacgccaccttgcacgccatggcaaataatcacaatagcgccgcttcggtggcgctgtatcccaaccataaaaacggcttacaccaggaggattggccatgccacgattttcagcaacaacaaaacttcgcaccttcgccgggatgccgatcccatactcatcaaccaaagccgtccagggcagcgagcacggcgtatacttccactggtgcggcaagtggcgcttcaccgtcattcgcggcttttacgtgacctgcgaccacgtggatattaccgactattccggcggaaaccaggttcatgagttcaataggcacgaatagcactttttgctaaaactcgatcggggcaatgcgttattattaccccatcgaaacagaggagcaaaaaacatgattggcaaccacaacaacgaactgaacgcagcagcccaccgtcgcgccgtcgagcagaacttcaacgcgcttaaagtagcctgcgatgagatgaaagcaatgcttgaactgccgtcatgggatccccaactcgaagactattacgacggcctccgcgtcaagcgtgacgatatcatcaaccgcctgcgcctggctggaatgtttctgtaaggagaacgcaatgattcacgaaattaagtctggaaaacaagtagtggccaccatcacgcagcgccacgttgtagcatttcagtttaacatccccggcaccaacgatatgcagtctcttgacgtgccagtttgggctaacacgatcgccattgatgccgacggctcgatttgggcctacgagtcgaccgccgaggatgtttgcatcccggactactcgcgcaaagcctgggtggattgtgggccttccgaaaacaagatgcggtcagtaggggagatggatcgcttccatgattgggcagaatcgaagattgaccttcgcggcctgaaatagcacgcattgctaaacgcccggtcaagggatcgggcataatcatcacgaagtctattaacaaaccgattatgcaaggagacagaagaatgcaacaatttgaatctcgcggcaagacatacaacctgccggacactgctacccatgccgcccctggtgcgtgcggcggcctgtattttaaggatggcgatagttggtttttcatgggggatgtggttgggggtgtaccgacgaagacaggcagcttactcgtgggcttctacgatcacgacttggtggagttgaagccaaagcgcgtaccgttcgctttctggaaaaaaatcaaaggggcgatctttaaatgaatcaattcgaattcctggcgcgtgcgcaccgtgcgcttgcaatgtacgccttcagcaagaacatgaagattatcagtgttgaggttgagttcaacaatatcagcatttccggctacgttggcgactcataccacgtgacgaaattcagcttcccatcgctggcttgcctggagcgtgaggcattcggtttctgaatagcactttttgctaaatgcccggtcagcagatcgggcataatggccacacaccaaacaacggagattcaccatgattcgcactaccagaccactacccaataacctttacgccacgattggggttcgcgcggtgagacttattcacatcaacgaagttggcaacgtggctattttgtggtttaagcgccactcaagcggtgttggcctgagcattcaaagattcgggcgctttaacggcaactcccaaacccattctcattgggttgatggctcatactgctggacgcacgttaagcacgtcgagaacttcgacgccaaatcactgagcgacgacgacgcctggaagatggtaacagacctcttcggttatgatgcctgcatggaggtagttggatgatacgtttatcagacttcgatcgccactgcttaaccgggcaatttggcgaaaagccagtaatgtgcaagatctcgaaggtaaaaggcgaccccgtcgagcaggtcaatacgcttaaaggcctggcaatgcgcaaccgactttacatccatgtgcgcggcagactgttcgcacagcaggttcatttttcgcatgggacgtggttctacactggcggggacggggttggcccatcgcagaaaagggttatgctgcgcgagataatcgaacacggttacgtttggactaacgggatctactaatggaaacggtaaaagtaatttgcacgcacgctggctattcgccgctatccacctatttcacgcctggccgcgagtatgacgccatgttcggccccggccttgatgaagtgtggattttgcaggacgaccagaacaccacggaagacgaagaattttggccagcctgccgcatgccggacgaaaagatcgccatgtacgccaataggccatacgaaaacaacgttttgtttgaggtgaaagtatgaaagtaagcaaaaagaaactcgcgctgtattgggccttcttcctggctggccttgccctgcataacagcgtgggctggcagacgatcggaatgctgtgcatgattattggtgtatgccgactgtctgagattaacgggttccgccgtggatatcgggcagcattcagcggcgaaaaagaatagcactttttgttaaaactgccgtaacgtcatttgataaagtggcgttactgaagtgaaacaatccaatcaggagcaacgcaatgaacgataatttaatcgcactgctggaagaactgaattcctacggctgtgcatacatcgagctttctagcgaacacgttatcgaagtcattattgacgatgacgcagggttcaccaagttaagggtggctaccggggccgaagaggaattcgaagactgcggcatccgtgaagtaaccaaccttctcgaagttcaccaggtgaaggagatccgctaatgaaaaccgtcaaactaatggttgtcaatgcggcccgcgaacgtgaacgccaccttatcggctgcgtattcgatgccgtcgaggtaaaagactcaaaaggagactttcacgtaatacagggcggataccttaacgaatttatcgtcaatccgctggatactgacgaagatttgaccatccgtgttggtagcgagccggaaaacgcgcttttccacctgcgtaaagtatcgaaggcatcgcagcgcaagttgctggttcgcgcactgaagcgcatagcgaagcagcgcggctacaccgatgcatacatccgcaagttcggcacgttcgctggagtaggtgattgggcgcggtcatgggccgacttttatttcaacaaatccggcgaattttgttcagcgcatacggactggctgcatggcacggaacacgatccagttaacggccacgagtggtacgaattcattgaggcggaattagacgccctttgatagcacgaattgctaaaacgaacgtccggggatggtgcatactatccccacactaacgaacaaaggaaattacccatgaacaaaccaaaaatcatcctgatcccgtccgtcgattccgtggttaatacttatgctaaattcaccaaaggcaagcgctataccgcaaccgcatttaccaaatgttccggcgaaatgctgtacaaggtcagcgatgactacgggcgcgagtatcacgtaaacccaagatcttcgcactatcttggtggccatcgcttcgatattgagtacccgatcgaagattgcagtaagcgcgactcgttcacctacgatgacagccgttctatcgccattcgcgctgcaaccatcggggacgggtttattagccgggcctgcatcgttgatctgatcccgtccgataatcacgccaaagacgacgccgacacgctgttaaatgccgtcgttcgcgccggaatcggcttggagttaagtgatgcgtcgtgcgaatcattcatgcgtgaaccgttctcacgaatcgcggagcttgaaaagcaagttgcgttcctgactggtgaacttcaggccgcaaacagcaagatcgagaatgttcgcaaaatcatgcgtagcaagcctggccatgacattgaagattacgcgcgggttttgcgcatgatggccgacgcattcgccaaactttagcagtagcacgaattgctaaaacagatcaggggtaagctggtatagttaccccatcgaaacgaaacggagttacagcaatgaaaatcaaaatcaccaaaatcaacactcttaacggcgacggctcaattaccctggaagaatgcggcctcaaaatcggcgaagttcttgaggtcgacggccacttcaacgacggctcatactgtgtgatcgctccgcgcaatagcgagtttatccaggctggtgacaatatcagcgtaagcgcagacgaatgcgaggttgtggaagaatgagcaacaaatttgggtactgacttacaccattggaaccaacgaggggcgcaaatcgcgccgcctcatctgcgacaccaaagagcgggcgattaggcagcaaaccgttcttggtggcgaacttgtcgagtatctccgcaagcctgaagcgttcaaggtgaactggccggaaggcatggatatcaacggcgctttagcgagcctgcgtgaattgcagaacaacccgaagacgtggagcgactttcaatgcctgcgggcggagccggaagtgaaggccgaccagttcaccaatgttcggtcgcagcacgcggagtggtcggatcgccagttcggcgacgttgggccagtcgggccgctcaaacacctggcgaaagaggcgatcgaggccgccgaagcgccggatgacattagcgagttcgctgatatcctcatgctggtatgggacgcaacgcgccgcgccggattcagcgatgagcagttggctgaagcggtggcggaaaagctggaacggaacaagcgccgggcgtggggcgaggtcaaagatggcgagccttgccaccacgtaaaaaattaacgaaatcgaatgccgtttaaagcgcctgtaagccattctggctggcgcaaatttaaggagtacgattgtatgcctgaatactcgaaagtcgaagatatgccgattggtgcaacaattactggtatccgcatgagcgagtcggacgacgccatcaagccgctggcgttcccggttacgcaggtggagacggacagcagaaaagggttcatcttcatctacaaaaatttcaatagtccgctgcgggttgaagtattcatcgctcgcggaacctgggtagaatgggagaaggccaaatgttcggactgaatgaagcgcagtacaacgccgtaaagcgcatagcaaagcagatggccgcagaaacaaaagacgccatcaagaaggacaagaagacctacgatcaggtcgccgcgaagatgatcgataaacattgggcgcaaatcaacacgctggttactcgcggccagtttatatggatagctggctacctggaaggccgattcggtcgaagggatggcgagtatgaataaaaaacagccaaacgattcagtgacctattgacgcaatcgcgctgatcgggtaacgtgaaccatgtagacacaagaggcggtaaacatccgcaagcctggccccggttaggggcgtttacataggagttatgatgcaatataaaatcatgctcacagcaagaaaaatgggtggcttttgcaaatcctgcattcaagagttcagcatgactattgaggcgaacgacaccgccgacgcggtagagaaagcaaaaaagcaatccggcgtaaatctggatacgcataaaatcaacatcaactacataagggaaatcagatgatgctaactgtgattattgctcttttaatgctttttataggttatcacgtcggagcggctcaccttgtagagcgactttcaaagcgggtacatgaaggcacctttgctgccatgatgtacaataagaaaacggcacgttgggaaaaaattggcgatccggatggtatcgcaaaacgaattgctttttcgccgcttccgtatgttgactgtgagctatttgtgaaactacagaagacgctgaatcggcgaaacaaactgatatgacaaaagaacccgcttcggcgggtttttttatgcccgcgatctgatatactcgcaaatcaacacagaaggaggattacaa

SEQ ID NO: 241 - DNA, 49441 bp, synthetic construct
  source 1..49441: mol_type = other DNA
aatgtatgcaccatgcacgcaatttgccgatcgaagccagcaaaagcgccaggtgtttttcgccaacatttacgtcgtgtggaaatgtgggggaggaataatcttacctaaaaattgcgcaaaaagtgaccaacataagcctataatagatatataagtatatgataaataataatattattattattactctttatctatatatatgtttggtaagatttcttcggggaggttatggattcctcttgcgcaagccatagtttttagatgttccgccgcgaaaaaatgtatatagggatatataggggatgacagcaaatcttaccaaacacgcttaaacccttttacggcaaggcttgcgggtggtaagatgacattcccacacaagcaaaaacgacgtaaatgttggagaaaaacacatgcaatataaaggctatgagttcgaagaagtcgacgtgtccgagtggatgcagtacgacgcagataagcaggcagcttaccatgaatggctgcaatccatcacgtttggcggctcaccaggggtagacgatcggccagttgctgaaaagtcacccgccgcattcactggtaatcgttcgtccgagatccggcgcatgttcctggatggcgggcgacgtatccagatgacggcggaggagttcgcggataagttcggcgttcatccggtcgacaaccatttccgcaggccgttgctgaaactcctggagccgggagaagtgttgcgggtgagcctgggggcggggttgatctccgtctttaccgagttcgacgcaatgactggctcaaacatggaggctgaggcatacaggcggcagggcgctatctccgagagggaaaggattaagggtttagtggccgctcttgctgtagactttgccggacatgccctggccgggatttacaaggcgaacttgttcgcggctatcgatcttggattgaccgccagcgatatcagccaggaagcggccaccacgcaatagcactttttgttaaaacccggtcagagcgatcgggtattgtctttccatcgacaacgaaccgaggaaaacgaaatggtcactcttatcacatgggaacacgaaaacagcgagccagtggtgcgcgaattcgagaccgtagcggcatgttacaacctggcggcaaatggtggcttttacaaggcgcagatcgttaacgagttcggggttgttgattatgaattttaaggcgagcgacgtaaaacctggcgtggtctacggatcgcgcctcaataaccgcctttggcggtgggacggcgaaactatgtggactaaaggcgagggcgatgttatctggcatgaatgcggctggccataccccaccatgagccgcctcgatatcgcttattatctttcggttggcgatatgcacgagatggaagatagcactttttgctaaaacactgctgtcgagatccggtattatttattcatcgacaacaaagaggagatgaaaatgagcaagaagaatccatattcaaccagcaactaccataacgaacacgtcatgcgctggcactggcagaaactcaaagaacgccaccttgcacgccatggcaaataatcacaatagcgccgcttcggtggcgctgtatcccaaccataaaaacggcttacaccaggaggattggccatgccacgattttcagcaacaacaaaacttcgcaccttcgccgggatgccgatcccatactcatcaaccaaagccgtccagggcagcgagcacggcgtatacttccactggtgcggcaagtggcgcttcaccgtcattcgcggcttttacgtgacctgcgaccacgtggatattaccgactattccggcggaaaccaggttcatgagttcaataggcacgaatagcactttttgctaaaactcgatcggggcaatgcgttattattaccccatcgaaacagaggagcaaaaaacatgattggcaaccacaacaacgaactgaacgcagcagcccaccgtcgcgccgtcgagcagaacttcaacgcgcttaaagtagcctgcgatgagatgaaagcaatgcttgaactgccgtcatgggatccccaactcgaagactattacgacggcctccgcgtcaagcgtgacgatatcatcaaccgcctgcgcctggctggaatgtttctgtaaggagaacgcaatgattcacgaaattaagtctggaaaacaagtagtggccaccatcacgcagcgccacgttgtagcatttcagtttaacatccccggcaccaacgatatgcagtctcttgacgtgccagtttgggctaacacgatcgccattgatgccgacggctcgatttgggcctacgagtcgaccgccgaggatgtttgcatcccggactactcgcgcaaagcctgggtggattgtgggccttccgaaaacaagatgcggtcagtaggggagatggatcgcttccatgattgggcagaatcgaagattgaccttcgcggcctgaaatagcacgcattgctaaacgcccggtcaagggatcgggcataatcatcacgaagtctattaacaaaccgattatgcaaggagacagaagaatgcaacaatttgaatctcgcggcaagacatacaacctgccggacactgctacccatgccgcccctggtgcgtgcggcggcctgtattttaaggatggcgatagttggtttttcatgggggatgtggttgggggtgtaccgacgaagacaggcagcttactcgtgggcttctacgatcacgacttggtggagttgaagccaaagcgcgtaccgttcgctttctggaaaaaaatcaaaggggcgatctttaaatgaatcaattcgaattcctggcgcgtgcgcaccgtgcgcttgcaatgtacgccttcagcaagaacatgaagattatcagtgttgaggttgagttcaacaatatcagcatttccggctacgttggcgactcataccacgtgacgaaattcagcttcccatcgctggcttgcctggagcgtgaggcattcggtttctgaatagcactttttgctaaatgcccggtcagcagatcgggcataatggccacacaccaaacaacggagattcaccatgattcgcactaccagaccactacccaataacctttacgccacgattggggttcgcgcggtgagacttattcacatcaacgaagttggcaacgtggctattttgtggtttaagcgccactcaagcggtgttggcctgagcattcaaagattcgggcgctttaacggcaactcccaaacccattctcattgggttgatggctcatactgctggacgcacgttaagcacgtcgagaacttcgacgccaaatcactgagcgacgacgacgcctggaagatggtaacagacctcttcggttatgatgcctgcatggaggtagttggatgatacgtttatcagacttcgatcgccactgcttaaccgggcaatttggcgaaaagccagtaatgtgcaagatctcgaaggtaaaaggcgaccccgtcgagcaggtcaatacgcttaaaggcctggcaatgcgcaaccgactttacatccatgtgcgcggcagactgttcgcacagcaggttcatttttcgcatgggacgtggttctacactggcggggacggggttggcccatcgcagaaaagggttatgctgcgcgagataatcgaacacggttacgtttggactaacgggatctactaatggaaacggtaaaagtaatttgcacgcacgctggctattcgccgctatccacctatttcacgcctggccgcgagtatgacgccatgttcggccccggccttgatgaagtgtggattttgcaggacgaccagaacaccacggaagacgaagaattttggccagcctgccgcatgccggacgaaaagatcgccatgtacgccaataggccatacgaaaacaacgttttgtttgaggtgaaagtatgaaagtaagcaaaaagaaactcgcgctgtattgggccttcttcctggctggccttgccctgcataacagcgtgggctggcagacgatcggaatgctgtgcatgattattggtgtatgccgactgtctgagattaacgggttccgccgtggatatcgggcagcattcagcggcgaaaaagaatagcactttttgttaaaactgccgtaacgtcatttgataaagtggcgttactgaagtgaaacaatccaatcaggagcaacgcaatgaacgataatttaatcgcactgctggaagaactgaattcctacggctgtgcatacatcgagctttctagcgaacacgttatcgaagtcattattgacgatgacgcagggttcaccaagttaagggtggctaccggggccgaagaggaattcgaagactgcggcatccgtgaagtaaccaaccttctcgaagttcaccaggtgaaggagatccgctaatgaaaaccgtcaaactaatggttgtcaatgcggcccgcgaacgtgaacgccaccttatcggctgcgtattcgatgccgtcgaggtaaaagactcaaaaggagactttcacgtaatacagggcggataccttaacgaatttatcgtcaatccgctggatactgacgaagatttgaccatccgtgttggtagcgagccggaaaacgcgcttttccacctgcgtaaagtatcgaaggcatcgcagcgcaagttgctggttcgcgcactgaagcgcatagcgaagcagcgcggctacaccgatgcatacatccgcaagttcggcacgttcgctggagtaggtgattgggcgcggtcatgggccgacttttatttcaacaaatccggcgaattttgttcagcgcatacggactggctgcatggcacggaacacgatccagttaacggccacgagtggtacgaattcattgaggcggaattagacgccctttgatagcacgaattgctaaaacgaacgtccggggatggtgcatactatccccacactaacgaacaaaggaaattacccatgaacaaaccaaaaatcatcctgatcccgtccgtcgattccgtggttaatacttatgctaaattcaccaaaggcaagcgctataccgcaaccgcatttaccaaatgttccggcgaaatgctgtacaaggtcagcgatgactacgggcgcgagtatcacgtaaacccaagatcttcgcactatcttggtggccatcgcttcgatattgagtacccgatcgaagattgcagtaagcgcgactcgttcacctacgatgacagccgttctatcgccattcgcgctgcaaccatcggggacgggtttattagccgggcctgcatcgttgatctgatcccgtccgataatcacgccaaagacgacgccgacacgctgttaaatgccgtcgttcgcgccggaatcggcttggagttaagtgatgcgtcgtgcgaatcattcatgcgtgaaccgttctcacgaatcgcggagcttgaaaagcaagttgcgttcctgactggtgaacttcaggccgcaaacagcaagatcgagaatgttcgcaaaatcatgcgtagcaagcctggccatgacattgaagattacgcgcgggttttgcgcatgatggccgacgcattcgccaaactttagcagtagcacgaattgctaaaacagatcaggggtaagctggtatagttaccccatcgaaacgaaacggagttacagcaatgaaaatcaaaatcaccaaaatcaacactcttaacggcgacggctcaattaccctggaagaatgcggcctcaaaatcggcgaagttcttgaggtcgacggccacttcaacgacggctcatactgtgtgatcgctccgcgcaatagcgagtttatccaggctggtgacaatatcagcgtaagcgcagacgaatgcgaggttgtggaagaatgagcaacaaatttgggtactgacttacaccattggaaccaacgaggggcgcaaatcgcgccgcctcatctgcgacaccaaagagcgggcgattaggcagcaaaccgttcttggtggcgaacttgtcgagtatctccgcaagcctgaagcgttcaaggtgaactggccggaaggcatggatatcaacggcgctttagcgagcctgcgtgaattgcagaacaacccgaagacgtggagcgactttcaatgcctgcgggcggagccggaagtgaaggccgaccagttcaccaatgttcggtcgcagcacgcggagtggtcggatcgccagttcggcgacgttgggccagtcgggccgctcaaacacctggcgaaagaggcgatcgaggccgccgaagcgccggatgacattagcgagttcgctgatatcctcatgctggtatgggacgcaacgcgccgcgccggattcagcgatgagcagttggctgaagcggtggcggaaaagctggaacggaacaagcgccgggcgtggggcgaggtcaaagatggcgagccttgccaccacgtaaaaaattaacgaaatcgaatgccgtttaaagcgcctgtaagccattctggctggcgcaaatttaaggagtacgattgtatgcctgaatactcgaaagtcgaagatatgccgattggtgcaacaattactggtatccgcatgagcgagtcggacgacgccatcaagccgctggcgttcccggttacgcaggtggagacggacagcagaaaagggttcatcttcatctacaaaaatttcaatagtccgctgcgggttgaagtattcatcgctcgcggaacctgggtagaatgggagaaggccaaatgttcggactgaatgaagcgcagtacaacgccgtaaagcgcatagcaaagcagatggccgcagaaacaaaagacgccatcaagaaggacaagaagacctacgatcaggtcgccgcgaagatgatcgataaacattgggcgcaaatcaacacgctggttactcgcggccagtttatatggatagctggctacctggaaggccgattcggtcgaagggatggcgagtatgaataaaaaacagccaaacgattcagtgacctattgacgcaatcgcgctgatcgggtaacgtgaaccatgtagacacaagaggcggtaaacatccgcaagcctggccccggttaggggcgtttacataggagttatgatgcaatataaaatcatgctcacagcaagaaaaatgggtggcttttgcaaatcctgcattcaagagttcagcatgactattgaggcgaacgacaccgccgacgcggtagagaaagcaaaaaagcaatccggcgtaaatctggatacgcataaaatcaacatcaactacataagggaaatcagatgatgctaactgtgattattgctcttttaatgctttttataggttatcacgtcggagcggctcaccttgtagagcgactttcaaagcgggtacatgaaggcacctttgctgccatgatgtacaataagaaaacggcacgttgggaaaaaattggcgatccggatggtatcgcaaaacgaattgctttttcgccgcttccgtatgttgactgtgagctatttgtgaaactacagaagacgctgaatcggcgaaacaaactgatatgacaaaagaacccgcttcggcgggtttttttatgcccgcgatctgatatactcgcaaatcaacacagaaggaggattacaaatgtctgaagaacgtagaaaacgcgtaacgaaatcgcactttgcaggcaactttaaagcgctatatgaaaaggagttcggcgtggtgctagggcgcacggcagagatgacgccggaacaattttttgatatcgcaaagcgttacttccagtgggccgaagataacgcaatcaaggctgcggagacggcaacgtttcagggcgacgttaacgagtggggagtgaacaagcctcgaatttttacgctaacagggttaagcctgttttgcggcgtgaaccagtcaacgcttacacgctatcgccacgatcctaactatgctcccgtcatggagttcatcgactccgtgatctatgagcagaaatttcagcttgctgccgtcggcatgattaacgcttctttcgtcggaaaagagatggggatcgataagccaccagtgctgaacatcgacgctatcgccggggataagaacgagatcaccgaagagaggttagagaaggcagtgaccaatattcttgataagctgtaagggtcagatatgaacgaaatgatcatttgggaagacctgtcgccagccgataagctggcaattaaggcgcttagtacgcgcaacttttcgctattcatgaagatctggtttcagatcatccagggagaaaagctgatgtggaactggcatcactcctacttttgccacacggttgatgaaattatcgccgggaagcgcaagagcacgatcgttaacgttgcgccaggctccacaaagacggaggcgttctcaatccacctcgcgccgtatgcgtatcttaaatgccggaaggttcgaaaccttcagatctcgcagggtgacgcgctgtcaaaaggcaactccgatcgcgtgattaagatcttctcatctaacgagtggcaggagctatggccatcaaagttcgggcgcaagcagatcgatgaatttcaggtcatggacgataacgaccgcgtaaggctggaaatggtctcccgttcgtccggcggtcagatcgtcggtaagcgtggcgggtacatgacgccaggtttcagcggccttatcgcgctggatgatatcgacaaaccggatgatatgttctcgaaggtgaagcgtgagaaaaaccacgtactcctgaagaacaccattcgatcccgtcgagcgaagaagaagaaaggagacgaaacgccgatcctttccgtgcagcagcgattgcacgcgcaggattccacctggttcatgatgagcggcggcatggccatcgacttcgatcggattgttatcccggcgatggtaacgcgggaatatggcgaatcactccctgactggttgcgacctgagttcgagcgcgacgtgctttccggcccgtcggtggtaattgacggcgtggaatactggtcattttgggaggaaaacgaatcgatcgagaacctggttgcgctacgcgaagccgatctttatacgttcctttcgcagtatcagcaggaaccgatcgccctgggtggcaacgtgttcaagtcggagtggtggcgctattacggcgattccgacaaggcgcacgagccgcgcccggacaagttcgaatatacgttcatcacggcggacaccgcgcagaaggtcaaggagctaaacgactactctgtaatgtgctattggggcaagtatcgggatcgcgtctacttcattgacggaattcgcggaaaatgggaagcgccagatctccgcgttcaggccgaagcattcatcaagcagtgctggcgtcggaacaaggagtgcggaaaccttcgccggatctacatcgaagacaaggcgagcggtacaggtctaatccaggatttaacgaaggcggtaaacggcatgggcgagatcgtcccggtgcagcgcgataaagataaggtcactcgcgctatggatgcacaaccaatcatcaagggtgggcgtgtcgtgctgccggacaatcacccattcgttgcagagcttgaggcggagatgagcgcgtttacatatgacgattctcatccacacgatgatatttgcgacaacgtgtttgacgccgcaaacctggaaatgaacctgagcgacgatccggtagagcgaatgaaacgccttgcgggattgaaaaagctgggtcgctaatacataatgtgggcctgacggcccacacttaaacaaggttgaaatatgaataacattaagatggacgactataatcaaatctttaatggtggcgctggttatgcgtcaaccctcgcgtctatcgcggcaagatttggaacaatgtcgcaggttgaagagttctatcatgaaaacggcatggcgaagaaaatcgttgacgtgatcccggaagagatggtcgctcccggcttccagctaaacggcatttcagataacaccaagtttcaatctgaatgggacgggttaaatctggagccgcaaatcaccgatgctctttgctgggctaggctgtatggtggctcctacgtcctggcgatggttaacgatggtcgcgcattgacttcggcagcgaagcggggtaagccactcgaatctatcgttgtttacgaccatgattccgtttccgtcgcagaggaggaaaccagtccgcgaagcccacgattcggaaagcctaaaatgtacgaggtgaagccgctaaacggcgggcaaccgttcaaggtgcattatacccgtatgcactacatcgacggcgagcgcgtaaccaacaaggtgcgcaagctaaataatggcgctggtggctcggtgctgaacaagtcgattattgaagcgattcttgattacgactattcggaatatctggcgacgcaactactgaagcgcaagcagcagggcgtttggaaggcgaaaggcctggcgctaatctgcgacgacaaagaaggcgagtacgccgcccggttgcgcatggcgcaggttgatgctaattccggcgtcggaaacacgatcggtattgatgcggacgacgaagagtacaccgttatcaactccgatatttcaggcatcccggaattcctttccgcgaaaatggatcggattgtcgccctgtcaggcattcacgagatcgtgctaaaaaacaaaaacactggtggcgtaagtgcaagccagaacacggcgctacagacgttctacaaactggttgaccgcaagcgcaatgacgattacaagccgctgttagaattcctgttacagttcatcgtaacggaggatgaatacagcgtcgagttcgaaccgttgtcgctgcctaccgatgcggagaaagcggatatcttccagaagaacgccaacgcggctcgcagcctcgttaccgaccaggttattgacgccaacgaagcgcgtgatactctgtcggcgttgattcctgaactgaagctaaaaggcaacgctccgaagcagaaaaaacttccggatcgcgccgctggttcaggcagcacgcaaagcgcagagatcttaaacaacacggaggcggatgatgaaagttaacggcagaatcccaaactggcgttatcctgaagcaagcgagcgggagttatcccgctcaatgcaggacgcggtgacagaactcgtggtagaaatgcgggatcgcttagaccgccttaaatttgacgccacggctgaggaaatcagccaggcggaagacgatatcagcgaatctgccatcgtgttcttttccgccgtaattgcggcgctttcctccattgggttgactatctatagattcaattctaaacagtggcttgcaattgcgatcgcggctggcgggcggaacaacgaatcagttatgcgccttaaagaattcggtgctggtgggtatgaagactggtatcaggaatcgctaaataagtggcaggattacgccgaagcgtcaatcaggaagttagcaagcgatatagttgctgactggacaacgaaagttagaaccgccaacaacattggcaagtctcgcaagcagatcgatgaaatcatcgaaggtcgatacgctatctatggtagttggtcgcgcaaccgggcaagcggaatcatcggaacttttaacagtatgttgatgatgcagcgcctaaaagatgctaaagtatcgcattacttttggttcgggatgatggacgaccgcgagcgcgagagccatatcaagctagaaggtaagcgacgccccgttaatggtgacggaatcttccccggcgaagaatacggttgcaggtgctgggcggttccgtcatttgataatgaggatgattgatggttaactttaatgattactttaatcacgtaggaaaggatctgatatggaagcgagcaacatcaaaccgcgtaaaagttggtgatgttgccgggtggaaagatgagcatgggtatgtatacattagattcatgggcaaactgcgacaagctcaccggatcatttgggaaatgcaccacggcccaataccagaaggaatggaaatcgatcatattaaccatgtaacggacgataacaggatcgagaatttaaggcttgtaaccagaaaggaaaactgtaaaaacgtatcaatgagcgtaacaaataagagtggagttgtaggcgtgagttggtgcaagagaacaggtaaatggtttgcatccataagggttgataaaaaagagcgattcttaggtagatacgaagacaaaaacgaagccatttcagcaagaaaggcggcagaggcaaaatacaatttccataaaaatcacggagataaaaaatgaaaagagttcaaaggttcgacacggtaaagatgaaggccagattcgatgagaacggctttctggttgatactccgatcgtggcgcgtatcggtgcgcagacgtaccagacgccaaccgggcagcgcgtcgagttccgcccgcgttcggaggtgttcgatgctgaatcgctggcttcataccagggcaagccgatcactttgggtcacaagatggtgaacgcgcagaacgcaaaaggccttgtcgttggctcgtgctccggcgctggcaaagaagatgggattggtgttcttgttccggtgatgatttacgacggcgagtcaatcgagcaagccaaaaagcgcgtagctgctgagttatcagtgggctacacttcggtcgatatcgatcgcaaaggttggggtaataacgcaactggcgaatattatttcgatgaagaccttccggaaaacttcgaagagatgaaaaatgattccgtctctgattgggttcgctttgatgcagtgcagacgaagattcgcgtgaaccacgtagcgctcgttttccgtgggcgtgccgggattgcgaaattaaatcttgatagcgaacaagaattcccctatgatgacgactcaaaccacaaaggagctaaaacaatgatcattaaaattgacggcgtagatgttgaagtagcagataacgttggcgcttacattgcaaaactcgacgcgcaagttgcatcggcaaccagtcaggtaacgagcatcaccgcagagcgtgacgcacttcagaccaaagttgatggcattgaagatgaagtcgccgcccgcgttgctaaaatcaaagccgacgaagacgcaaagcagaaagttatcgcggttgtttctgccgctggcgtcaagtgtgacggcctggatgttaaggcaatgaaagttgcttacatcaaagaggttgacggtcgtgatctgtctgataaagaagattcgtacatcgacgcttcttttgactttatcgccaactctgataagatggctggcaatcgctccaaagtcttcggcaaaaaagaagatggcgagcaaaaagacaaaggcggcttaccgaaacttgacggcaccgaaatcatcgatccgcaggcaaaattccgccgctaataatttgcggccttcgggccgctaccagaccaaataaacaggagattcaaaatggcacagattccagcttcttattcccgcaagcgtgatattgccgtagcggggcagatcgctgatacgtcgctttataatatcgacggcacttgcgttgctgaaggcgatatcaaggctggcgtactggtggcttccactggcgtagtttccaatggccataaggtcgttaagccagcgaaagcagcgagcgacgtcattgtaggcatcgcgcagttctcgcaagcctactcgcctgaaggcaagtatgacgatgagagcgcggttaacgttatgactcatggccgcatttgggcgatcgcggacgcaactgttactgaagcagattgcgtgtttgattctttcgccacctttaccgcaaacggcaccgtagcgaagggtgatgccggggttatcaaaactggctacaaacacactggcgaatacaccaagaacgcagatggcaccgttctggtgaaagtgcaggtgcttcagggcgccgttgctccagcggctgcaactggcggcgctggcgtataaaataaggggcttcggccccatttttgcaccagaaaaaaacctttgacggcttaacgattcgtgatattcttcatctcgttaagccaaatacacaaacaggagtttttcagatgactatgaaattagatgcattcgaacagagtgcaattaaggtcgcaatgcagggcatgggcgtcgatgccgcaaaactggatgcttacggtatctggactgttaagcagatgactcaattactgaatcgccagtatgagcaggcatacccgcagaccagcgcacttgagcttttcccggtaactaccgagatctcgccgaccgcccgccgctttgagtggctcgaattcgacggcgtaacctctgcgaaaatcatcgccgattacaccgacgatctgccgaccgttgaagcgatggcaaaagagaagtcagggaaagttttccgcctgggtaacgcgtggtttatttccatcgacgaaattaaaactggtgcagcgctgggttcaagcctgagcgatcgaaaagcaaccctggcccgcgaaggtcatgagacgctcgtaaacgatctggtgttcaaaggctccactcctcacggtatcgtgagcattttcgaccagccgaacattaaccgcatgaccgccagtgctgcatggggcaatgattcagcggcggctgaaaaggcattcgaagatctggaagacctgcttaacatgatcgaagaaaccacgctgggccgccatcacgcgaccaacatcgtgattcctccgtctaagcgtcgtcttctgacgaaaaagatgccggacactagcggcgactcttatctgacttggttcaccaagaaccacccgaacatcaccattacggcgatggcggagttggaagatattgacggcgcaggcaccaaaggcgtgctggcatacgaaaaagacccaatgaacatgagcatcgagatccctgagcggttcaacatgctgccgatgcagccgaaagacctgcatttcaaagttccgtgcacctccaaatgcactggtctcatcgtgtaccgcccgctgactattgcgattctcaccgggatttaatcaaaagcgccttcgggcgcttttttattgcattgcattctgcaatgtgctttaatttgaaacctaaagtaaaccaatggagcattaacaatggccagtaaaaaagaaaccgtagaaaccgtagaaaccgcagaaatcaccagcgaagaacagacgccgcaggttgttcaactgcaaaacgttggtgcatgtgcaattcgctataaaggcacaaattacgtctatgagcaggttttcgaagtgccagaaagcgagatcgaccgattccgccacgaaatcttcaaaggccgcgtcgagttctacgacaatcctaaacgcacgcgcgaatacatcgcagcggtaaaggcgacagcgaaagagatcgtgcagcctaaaagcgcggaataacaaaaaccaacaaagggcgcttcggcgtcctttttcatatcaggagagcaaccatgaattacacaattcaagatgtgatcgataaaatgcgcagccttgcacctccgcttaaagaagttccagatgaactgctgtctgcatgggttgtgcttgccgaagaattcgtttgcaaatcccggttcggagactccatcgttacggcgatcgcgttgatgaccatgcatctaatgtttttggacggcgcaatgaagcaggaaggcgaaagcctggaatcttacacgcagcgagtggcgtcgttcaccctgaccggggagttttcccaaaccttcgatcgcgtgtcggcgtcaagtgataacgaaatgctttctacgccgtggggcaaaatgtactggcgtatgctcaagatgcgcggcggcggcttcggcctgcttaccgccgggaacgtgcgccgctgcggaatggttaggtgatcgctatgaactacaaagcaatccaggcacgcgcaagcgctggcattaaattcttcagcgacgctggcggcgtgttcaacaagtacacgaaaggcgctggcggaggaatcgatccggaaaccggggaagatatcattcctggcgaggtggtgacgacaatcaagggagcgatcagggatgttaatgaccgtgacattaacggcgaaaccatccttgctggcgataagcgcggttttttcactcatgatgtgccaatcatggaaggtgacgaaatcgaagtagacggagagcgctaccgcgtggttaatgcccgcccggtaaaaccaacgggaaccgtcgttgcctaccgtccagttttgcgcagggtggcgacttatggctaattacactatccgcgaattcacaggcgcaattgatgcgtggtgtaaggccgctggtgatgcgctggaggacgttgtaaggtttacgtgtgaagatattcaccgcgaccttgtaatgcgttctccggttgatacagggcgcttccgtggtaactggcaaatcacctttaaccgcgccccgctttacgcgattaacgcatacgaccaaactggcgaaaagacaatccagaacggcaaagccaacattgcactatacgcaaaaggggccgggatcacttcgatctggttcagtaacatgctaatctatgcgaacgcgctggaatacggccattcaaagcaggctcccaatggcgttatgggcgttgttgcgatccggttgggcgtttatgttactgaggcaatcaagcgagcgagggcgaaaaatgcattatgatatggcgttaaaatgcaaggcggcagtggctaaatttgccgccgagaacgggttgagggtcgcgggggataacgttgactttatcccaccgagaggcggggaaacctaccttaaagtctcctacgtcgaggcggattcaagatcggttgacctgtcaaggaaatgccgagtctatctggcgatggttcagattgacgttatctttaagcctggaatcggaaccgatcgagcgaggattatcgcccaacgcgttgcaaaatccttccctgaaggaaagattgttgatcgtgacggtaagttatatgtgagcgagtgggcggaggtacacggcgtgcagaagcacgaaacgggttggttcttcccggttcggttcacagtaagatgcgaccgcacggaggagagcggctatccatccaactagcggaacctcacgtcgcttataatttcttgccagcctggaaatatgtaggcataatggcggtgtaaaactttcattcaaacaggagtattcaacatgcatttaccaaacggtgctaaggtcttctttgagaaggctcgcggtgcgaagattccgtttaccgcaatgaccaacgacgcgaaaaacccaaaaatcacggtggcagatggcaagctgaaggtgaaagatattgtgatcttcaccgattgcacctgggacgacttcgttaacaaggtggctcgcgtaaaagcagtgacagcaggcgtggcaacgctggaagagttcgacacctccgacactaacaagtatcctggcggcgcggctactggtaacgtaagcgtgatcactgattgggtggaattgccttgcattcaggatttaggcaaagatggcaacgaacagcagttctataactatcagtgcttgagcgatgagcgcgaacaatccgaacctacttacaagtcggcagtgacgcttaactacacgtttgcgcacgattacagtaacgcgatctaccctgtgttgcgttcagccgacgccagcaagcaggcgagagcgatgtacatgtatatcccgcgagcttccgaggttcgttactggtctggaattgcatctttcgatgacattccttccacggctgttaacgagatggaaacggtaacgcttaacattgcgcttaaaggtgctcacgtcttccttccggttgccgtgtaattaaatggcggggcttgtgcctcgcctttttttgtgcataatagcgaataacacaaaccaatcaggagttaacaaaatggctaaattcaaaattcaaatcggcggcaatctcccttctttcaagctgcctgtaaccttcacttgccccgacggcaaagaagcaaccatcaccatgacagtaaaacatcgttcaaccgatgagatgaaagacttttatgagagcgaagataaagcgccaaagggtaacgccgagtttatccgcttcatggctgaaggttgggatctggatgacgaattcagcgatgaaaacatttcctggctttgcgctcacttcccggcgttcgtcatggcactgccacaaacttacatggccgcgctggcgggccaccgtgcaaaagtttaaggcgggctgtttatctcacgcttcagcctgagctaaccgatcgccagcttgcggagtacgggttaaggcgatcggattatgaagcagatcttgaaacgatctactttgatgaacagaccgcccaaagctggcagctattccaggccatgcaaacgcagtggcgaatcgggatgaatggcccgacggggcttgactataatacgttgcctatgctgttcgaattgtataaaatcgacaatcgagaagcggcattacttgacttgcaaatccttgagggtgaatacctgaaggagatttacaagaaatccaaataagcgcctactggcgcttttttcatatgggggcgaaacatggctgataaagtagctgggctaacgtttggcgttgacgtgtcgcaggttgataaagcggtacgatcactcgcagaactgaaaaaccaaagccagcaaacgggcgctggcctacagtcacttgctgacgctgaaaggcgggccacggcgcagaccgaggaaatgaaccgcgcattgcagcgccagaagcaagagactgacaaatcaaaaaccagctttagcaggatcgcaagcgccatcgatcccacgatcacaaaaatggccaacttgcgcaaagcgacggaagaacttgataaagcgtgggcgcttgggcttgttcctgacaaggaatttttccgcctgggagccatcattgaatccacaaccaacaatctacggcggcagcaggcggcgctaaccgaagaaggtcgcgcagcaatcgcagaggcggaggcaaagcagaaggcggcaaatgccgggcgtgattttgtcgccagcctgaaacagcaggctgactccatcggaaaaacacgcgccgaactgctggaaatgaaggcggcgcaattgggcgtatcggcagaagcggccccgttcattaacgcgctgaaacagcaagagcaggcgttaaagaaacagcaaaacgctatgggcctggctggcatttctgccgggcaatataaaatggccatgcgccagttaccgatgcagatcacggatattgtaacttcccttgcgtcaggtatgccagtctggctggttgcggtgcagcagggcgggcaaatcaaggacagcttcggaggcttgagcaatacgtttaaggtgttgttgagctacatcaacccgctaacggttggtgctgcgtcgttgggtatcgccctggcggcaatcgctaaagctggttatgactcctggagtgcgcaacgagaactggcgaatgcgctggtgctgactggtggctatgctgcgaccacaaccgggcagatcacagccttaaccgaagagattaacaaaaactcatcggccacgattggcagcattcaggaaatcgcaacatcgctcgccagttctggtaagtacaccatcaaccagattaagcagatcacgaagactacggcggaatggtcggcgcagacgggggagagcgagaagacgatcacagggtattttgatgccatcgtaaaagaccctgttaaggggcttgccgatctcaatgagcgttttaattttctgaaagagggccagctaacctacatcgaatctttgcgtaaaacaaaaggcgagacggcagcagcagatgcggcgacaaaactgtttgctgatactatggataagcgccttaaagatatcgcggacagtgcaacgccactcgaaacgatgtggatggatattaaaaaatgggcggctgactcgtggaagtgggtaggcgatcacacggtaggggcgctaaaccttatcgttgacacggtttccgcaatcatcaacacgatcagaaagctgattgccgacggcgacgccatgatcgcgcagttcatcgttgacgctggccgacagctacagaagatccccggcatgggagactttgggaatgactttctggcgcagcaggagcagttaatcaaggactcgaaagccaaatccgccgagcttgcaaaaaccattgcggaacagcaggcaaggatcgcaaaaggcgagatgggttacattgacgccgcgaaggataaaaccctttccggtgggtacagcagcaaaacgaaggatcgcgtaaatcaggaagaaaaagatatcctgaaaaaccgcaacgccaggaagcagcaggtagacgcgggcgttaaaattgatgagcagtatcaggctgaactgctatcgctacaggcgcagttaaaggttttgcagcagcacaaagggcttgatgacaagatcagccagcagcgcaaagactacttcgagacggttgctaaattccaggttttggaagaggcaagccagaagcgaaaactgacccaaagcgaacagcagatgctggcgaacaaaaagaatatcctgtacatggcggagcaaaaggccatcgtgggagatcagattgttcagcagcagagattgaacgccttgcttgacaagtcgaccaagtatcaaaaccagatggcggagaaaaccaaagcgctacaggataccgccggaatgggtagcaaggagcaggagagataccgggccaatgcgcaaatggcggctgactggaaaaacaacggcggatctttaagtgaccctggatttaaagcgatgcaggccgcaagcgataaattctacgcacagcaagatgcgcaaatgatgaactggaaggccgggttcactcatgcgtgggctgatattggcgacgaagttaatgacgtatacaccaacatcggggatatcactaaaaacacatttaacggcatggcgagcgtgctgactgattttgtaatgactggtaaagccagctttagcgactttgcaaagagcgtgatcactgacattaccaacatgcttatcaagatggcgctgtttaactcgctttctgccgcgtttggtggtggcggcacgttcagcttcgccaacatgttcagcaagggattttctggtggtggctacactggcgacggcgggaagtatgaaccaaaaggcgttgttcacggcggggaattcgtattcacgaaggaggctacgcaaaggttaggcccggaaaacctgtaccgactcatgcgcggctatgcaagtggcggcctggttggtggtaacgcaagttccggatctggaatcaccaacggcggcaacgtcgcagcgtcggcggctatggtgttcactatcggtgacattaacattacgatgggttccggtcaggatagtaaggggatggagcagggcgtaaggcagatcgtgaacgatatgttcaccgaggctttgagccaaaacgggcgcattgcgaagttcgtcaatgagaaaacgagggggtagtagtggattcctttaaatggtgtacacaaattcaaggaggggcggcaaaggtagccgtctccaacaacattcgatcgatcagtttcggaaacggctatatccaaacggcgtcgagcggcattaacaccaagcgccggacggttccgatcgtttatggcggttcagattgggaggaggtttataacttctgtcaggatcacgtaaccaagccgtttgtgtggaaggcacctgatggaagaatgggcgtattcgtcgtaactgccgactccgttaaccttgcgccgcatggtggcggcgtgtttgaggtaactgcggagttcgccgaacgcttcacttcagccggataatcaaaagcgccctttacgggtgcttttttttggcctatgatctggagtcaattagaggagggcttacgatgacagccaacatttcaaaagagtttacgaactgcttacaaaaacttttccccggcgagatcctgacgctgatcgatatcgacgccacaaagttcggcgggcaggtctaccgattccataacgagaacgtcgcctatacaaccgaggagcttttagcggcggtgaacggcgggacgcttcagccaaaaatgatcacgtttcgcggcgagcaatacggcccgcgcccgttcggcctgggcgggatcgcaatgtcgagcgatggcacagtggaaaagccaacgttgacggttagcaatattgatgcgcaggcgagtgctcttattcgcgcctacaacggcctcatgcaagccaaagttacggtatgggttttggtcaatgaattgctgcaaaacgacggcagtgttaaagagggcgattttaggcgatttgtttactacatcgagcgaccaaagcaagtagacccgcaaaaggcaacgttcgaattaacatccgtgtttgatatggacggattgatgatcccggcccgactgacgcaaaccgtttgctattgggcgcagcgcggctggtataaatccggcaagggctgcgactacaacgggcagaacggatacttcgacaagttaggaaacagggttgacgacccgtcgcgggatgtttgcggtggcctggtgtcttcttgcaggcttcgttttggcaatgaaccgttgagtttcggcggttgtgcgacagcaactttgaagagtggtagctaatatgttgactccgaaaattaaaatgcagatcatgcagcacgcgaaggaagtctacccgcacgaatgcgccgggctggtaacgcaaaaatcacgcgtgcaaaaatatcaccgactagacaatgtttctcaagatcctgagaacgaatcaatgccggacgaaacgcagtatgcgatggcgtcaatggagggggagccgatcgccttcgttcattcccatactggcgacggggcgaccacgattccgagtgccacagatttatgcttttgcgatgagtctggattgtcgtgggttatcgtctccatcccggaaggtgatatgcgaatcattgagccgaaacgccgacctctgattggtcgcccctgggctttgggcgcttacgattgctatggcctaatcatggattttcacaagcgccacggcgtcacgctaaaagatcggcgattgccgttcgaatggtggaagccggaatacaaagagaatctttaccaggattactggcaagaggacggattcattgaaaacactggcgagcctgaagttggcgatatgatcatcttccagattcaggcggaaaagtggaatcacgcgggtatttacgttggaaacaataacatccttcatcacgcgtttggcaagctgtctcgccgggatatctattctggatggtacgagcagcacaaggttttaatttgcaggcacaaggagcttaaacatggcatcacatacaaagacgattaaactttctggttcccttgggcgtaggttcggagtattccacaaacttgcggttgattcggttgctgaatgtatccgggcgctgtcttaccaggttgaggggtttaagcctttcatgcagagcaaggttggtttaaatatgcgcttcggcgttgtcgccgacggaaaaccaatcagcgcgaacgaccttgcgacttttgccgtggcgagggagattagaatcatcccgatcccaaaagccagaaagaacggcgggttgttgcaggtcgttatcggagcggcgattatggttgcggccttctttactggcggcggctcgctggcggctatgggcgctttttcgtcggcagcattcatggctggcggatcgatggttttaggtggcgtaatgcagatgatcgcaccgcagatgggcggcaacatgcgggcgagcgaatcgcctgagaataagccatcgtatgcgttcggcgggccgattaataccacggcggccgggtatccaatccagttgccatacggttacagattggctggaggcgcattgttcggttcgggatcttacgcagaagacaacaactaattaagccattcgctttttagcctgggggcgtagcctccgggctttttgtcgtgtacaattgcgatactattaacaggaggctaaacgatgactaatatcaaggcccgcaagggcggttcaagcaagccacgcactcccgtagaaatgccagataacctgatctcaaaagataagatcaagttattgcttgctgtttcggatggcgaggtggttaacgacttcagcctgaagcagttgcattttggaggcgtcccggttcagaacgaggatggaacattcaactatgagggcgtgattgcagagttccgccccggcacgcaaacgcaggactacattcagggcttcagcgaatcaagcgctgaattccaggttgctcgtgaagtcactcacaacacgccttatacgcttaccgtatcgaacaaaaatctttctgccattcgctttcgcctgttatggccgcgcgtgctgactcaaaaagataacggcgatatggtcggatcggttgttgagtacaagatcgagatggcggtagacggcgcaagttatcagacctacctaactggcaaaattgacggaaagaacacgactggcggttacgatcggagcattcgcgttaaccttccgcaaaacttcacgtcgcaggtgcttatccgtgttagccgagtaactccggacgctgacggggtgaaggttgtcgatgcgttccaggttcaatcatacgctgaggtcattgatgcaaaattccgctacccgttaacggccatgctttacgttgagttcgatagcgatctgttccagaaccagatcccaaccatctcactcaaaaagaaatggaaaattattcaggttccgagtaattacgatccgattaatcgcacatactccgggacgtgggacggtgtttttaagtgggcgtggagcaataacccggcatgggtgctttatgacctgatcatgaatcagcgctatggtttagaccagcgtgagttaggaatcccggttgataagtggtcgctgtatgaggtggcgcaatactgtgatgaacttgttcctgataatcgcggcgggatggaaccgcgctatttgatggatgtaattgttcaatcgcaggttgaggcgttccagttggtaagggatatttgttccgcgttccgtggaatgacgttctacaacggggaaagcctttcgattatcgtcgataagccgcgcgatccggtgtacctgtttacggctgataacgtcgttgatggcgttttcgttcggacgttcccaagcgaaaagacgatgtacacgtcgtgcaacgtcatgttcgacgacgaagaaaaccagtacgaacaggatgttgaaccagtattcaaccctgacgcagccatgcggttcggccacaacccgaccagcattacagcgatcggatgtaccagaaggacagaggcgaaccgccgtggtcgctggattctgcaaacgaacctaagcgccacaaccgtttcgttttctactggcctggaaggtatgattccttcttgcggcgatgtgatttacgttgcagatccgcattggcaatcggcctttaacctggtgctatcaggccgcgttatggaagtgtctggcgtgcaggtgttccttgcctaccgctgcgacgcgaaggctggcgacactctgatcctgaatacagacgacggcaagccagtgcgccgcacaatcgccagcgtttcggcggacggtaagaccatcacgctaaatgttgggtataactttgacgttgcgcctgacagcgtattcctgatcgagagcgatcagcttgcagcggaacagtatgtagtaacccggattgaaaagggtagtgatgacgacgaatttactttcgccatcacggctacgcagtacgatccgaacaagtatgacgcgatcgataacggggtaattaccgatggccgaccaacttcggttgtcgaccctgattcaatgggcgcaccgaaagacttaacgattagctctttctcccgcattgttcaggggatgagcgtcgagacgatggttatcggatggtctgccgtgcagtatgcaaaactgtacgaggtgcaatggcgcaaggacggtggtaactggaacaacgttccgcgcactgcgacaacgcaggttgatatcgaaggcatctatgctggcgagtatcaggcccgcgtgaggtgcattagcggtgggaatgtagcgtctccgtggtctgaattggcaaccgccacactgaccgggaaagtcggagcgccaaaaggcccgattaacctgtttgcgtcggacaatgagatcttcggcattcgagttaagtgggctatgccggaaggagcggaagacacggcatacattgagctttaccagtcgcaaagcggaaccgatcaggacgcaagcctgcttactctgattccttacccggcggctgaatactggcactcaattttgcccgctggctacgtgaacttctacaaagccagaagcgtagaccggatcggcaatgtttcagaatggactgattacgctcgcggcatgtcgtcgactgacgttaacatcatcacagatgcgatcctggatgaaatcctggatagcgacgcgatgaaggaactacaggaaaacgcacaggatagcgcggcaaaactcaatgactacgcgaacagcatcattcaaaatgcgctggcgaatgatgcggacgttaggaaaatgacgaaggagaacggtaagcgtaaggcagagatcgcgcataccacggtgctgattgccaacgaatcagaagcgagggcggctgaaattacgcaacttaaagcgcagattgatgaagatatcacgtcgcagattacgatccttaacgaagccctggcgacggaaagcgagacgagagcaacgcagattggtcagttgcaggcagattttgcggctgatattgacggcgtaaaaacaacaatgaacgctggttttacgcaggttaatcaggctattgcaaatgaaagtgacgcgcgtgcaagttccgaggcggcactagatgccaaaatcgggcagaactccgcagcgctaaaccagaaactcgactcgtgggcgaacgttaatggcgtcggttccatgtacacgatgaagttgggcttgaggtacaacggtcaggagtatagctccgggatggccctacagcttacctcaagtggtggaagcgttgtttcgcaggtgctgttcattgctgatagatttgctatcatccgtaatgcggcgtctggcgcgtacacgctaccgtttgttgtgcagaatgaccaagtgttcatgaataacgcgcttattcaggacggttcgattaccaacgcgaagatcggtaacgtcattcagtccaacaactttcaggagaatgttgcaggatggaggcttgataaaaacggcgtatttgtcaactatggctcaacttctggcgaaggttccatcaagcaaacgaaccagaacatcactgttcgagatggtagcgggcgcgttcgttgccagttgggtaggatcactggatcatggtaaaattaatgccgggagaaatcccggcttaaccaaaggaggcagacaatggcttatggttttcaatcatgggatgcgaacgggaaccccaacaactatgggatcgtccctgtttcagttgctggatatattgcattagcgcaaggccagaaaagcggaacgtggtattacaacgtcccgcctgggttgaggcttggtttcttttgggtcgcaaatcaagaccagtacggcacatcgaagaggcgaattaccgttagtggtaatcagatcgttgtttcagatgcgccagatgatgcgctggaatcaggcgtctacccggcgacgcaaggttttattgtcgttcaaattatgagttgatgattatggcagattacggaattttacttaccaatgatagcggcaatgtttgggtttcgcctcaaagcatcccactggcactactatcaaagcagagcatcactcttaggggtggtactaactccgatgaagtaagatcggtaacttacgacacgaatcacccatgcgttccgttcgtggtctttcatggatcttcgccacaaggtgcattcacaaaaatcaagtacagcggaaacacttgcagcgttgttttttcttttggtaagcaaaacgtatatgcggaggtttattttttctccgtgttcccacagccaaatcctggttatgggcttgcaatttgggatgaaaacggcacgctgattttgaccaatgaaaccagaacactttcagacgtacagacctacggcactggttttaatctaaacgtcactaacggcgggaagtgggcggttagtcctgttcagttaggcgcgatcgttggtgttgttcgcgatccctacccaagaccatttcagggcgactattgcgcagcggcattctttaacggctcaagcacgcaacttaccgcatatctaacgcaggcaccaggaggagccgccagcgatctaacctacgtcaatatgaaaaacacctgcatcgctattgattgcgcaagatacgactaaaagaaaggggccatacggcccctttttctaccccttgagatttttgatctcctcttttaattcatcaacttgagcagacagagctttgattgcgcaaattgcatccatcaaaagagcattattgtcaagcacaagtttcttattttcaactacgttaccctcatcatcctgataggatgcgctgctttctttaacgtagcacgaatcgatatctcgcacctgctgtgcaataactcccctacgctcgcgtttcttaacatcatccttataggtgaacttgaccagattcattgctttgatgttttcgagtgactgcaaaccatcataagcaacaacattgtctttgtagttaatgtcagatagaccagcaaaaacaacgttgccataagcagtgcttgcaatattaccatctgatttaaactgccaatactgcgtattaccgccagttccccatttgctgacctcaataacggcacgatgttcataacccctatgttcctcaagccacatagcgcaacgcgcaccgttaccattaatgttgaaccgtgagataaatgatggagatttaaggatatcaccattattcccatttggatcgctagttggccacgctacaaaagcatcattaacggtactcctcacagtcccatatgacacaacacttccgcgaagatcggcagccccgccaactcgcaacgtgctcgacattgtaacagcgccgcgaagatcggcagccccgtcagcacgcaacgtgcttgacattgtaacagcattgctaaagtttgcattcaacccggtaacagcaaagttcgatgcatcaaaaacaacctgcttcgcgctgttcatatctccattagggcggaagtacattccttgaccattttcagggattgagtacacgatcgcattgctgttatttgccctaatagtgcaaccgttcagggtcagcgtggcgtttcctccaggaacgctaattgcctgcggctggctgaacgtgttagctacgttggtgcgcgggatcgtattatcattagccatcaaatagtcagacggtgaattatatacaattccagaaggctccgtgtcaatccaggtataaccagtgcgatcaatgattggccccgtaatcgaccctttgttagcctgtacgtttacatgattcaaccacagttcaggaacccatccgccgggagcatgaatataaacatcaaacgaggagtctgtgtttttcaccaccccaagattaatgcgtctggtgtcgtttggtctggcagcaatcagggtgcgctgagtaaaccaagtgtcaatattattactggttagcgtatcgggaagaccgcggccagaaatcgaaaagatatcaaccgggagatttgcagtgccataaccagtacctccgccaatgatgaactgagcaaatgcgtagccatcaccagcgttcttgacgttggcgatcttcatccacttctccccagcgaaagtgccagtaattttatccggcacctggacgccagccacaaggtcgacaacctgatcacgaagattttgcgtctgccccttcgcagtttgcgcgtcgttcttcgccgagttggccgcagtttctgacgcttttgcattggtctccgaggttttggctgcggtttctgatgcctttgcattggtctccgagtttttggccgcagtttctgacgctttggcgttggtctctgaggtcttcgctgcggtttctgatgcctttgcgttagtctccgacgtcttcgcagcattcttggatgcagcagcattggtctctgaagtctttgcagcggtttctgatgcctttgcattggtctccgaggttttggccttattctccgaagatttagcgttcgtctctgaggtcttcgctgcggtttctgacgctttggcgttggtctctgaagtttttgcagcgctttcagacgcagccgcagccgtagcgcttgcgcccgcagcttcggaatctgccctcacctgatcggcaagactttgcagagcttcgaaatcgaagttcttaaagaagtcgacagcatccgcaatttgagtttcctgtgactggtagtagcgcagagtttccgcaacatcttgcgccagtccgtcaacggtcagcgagtcacttaacaggatcgcgtaatcgctagacgctacgacagcgccttttgtggtgatggctttaatttcagtatcgctaaccaccttgtttacgacggccatttgaattggtgacgacaaaaacataatcgtcgcaccagggcgaatcagcgaaagcgatgattgccattttgtgccagtcccggtaacggttccgtctgcggccatagccgctttgccttctctgtatagtgccatgtttttaagcctcattggttgattgagtaacgcagataatagcatcaatgaaccgataaaaaaaggagcctttcggctcctttagttgtcaaattagaacgggatatcatcatcgaaatccatccccgcattcccgccgctgttttgcggcttaggcgcttgttgcggcttgggttgttgaggctggccccacccggattgctgattgccgccgccgctttgcgaaggatcgcgctggctgaattcgagttgcggcataatcatttcgttgtggctgtaaattgtgccgttgtgctcgcggttaacgatctgaagcgtccggcaggttacgctgatcaccttatccatttgcagcgcttcgtcgtaccacttaatcatgttttcttttgcaaagaaaactgcgcggtagttcgtgtaaattgtttcgtcctcgccatcacgattgcggatcttcatccgctccgacaggtctacggcgtacattttccacggcccgttattgttgctgccctctttgacataaggcgcttttcggattacccctgttacaacatgcattgtcattcctatggggcggcttcccgcccgttaaattagttgaaagatgaaatatcttgcgcttctggttcaggttttgattctaccttttccggctcgcgcttcgcaacctcttgcggtttaccggggttaaatccgtttgccggggtgactttcagttctgcctggcgtttggtgatatcgtcttccgtcattttccactccgccggggttaacgtttgtttcgccagcttatagatctcacgaagcgattcgagatcttcgcacgcgtcaatgcgttttttgaagtctttcggtgtcattttcgtaatttctgcatcatcatccgcctgcttgatacctagcgctgcggccagcgcataacggcgggcgtaagatgttgttgagccgtatgcttgttcgacggttttactgatcggcatattgtactgaaacgccatgaactcgccgctttcatgcaaaaacatagtttcgaggtgcatcaccttttcggtgctcgtatccatcatggattgaatgaccataattttgttcttctccagcgccggggaaatagcgtcgaggatatccccaagattcgcataggtgttcccaagatggttgttcttaccgcttttctttgcggccacgaagccagattttgccttgattaatgcggctgcgatggtggtaaatttttcagatgtacgcatgataaagtttccttttcctaattggtaatgcgcactatatcacaagtgcgcaccagtgtttagctatttgtgccgtatacgtccgggaacatgtatttcacaaactgaggagtcggcaaaacaacttccgccgcgtttgactcatatgatggccatgaatcgtgcttcacgcattcagcatactgatgaatcacgctttgatactgtttgcgaccgatctcgatctgctggctggtcagggtgaacgccagcggagcaaacggtgattttttctcctgcgttagcagtctgacaactaccgggcgtttttcgttgtaagtcttcacgaacagatcgcgctgcaatgccatcttgagatagtagcccaagttgaaggcgagtcgcccgaaatcgtcaggcttggaagattgcgtggttttgtagtcggtaatcaccacgacctcgaaaacctcatccgggttgaacccccactccttgatgagttcgggatcggaaacaacgtcaacatgatcgagtcgaaccttaaccttgacgccgaagatctcaccgaagattgacaattcacgctgtgctgtaggcgattcgatacatgcggcgtgtcgcgggttagccagcatcacgctgcgcatttgaacaacggcatcgaaatcaacatccttaaccagcttgcgcccggagtttatcgcggcgctttcgtcgcacagttcaatagcccaccaaacatttacgtcaatcccggcgcgatatgccatttccagaagttccgggtaatccttgttggacgtcccaatcaggccacacgctttcagcttcgcagacagtgccgacttcgacgtaatcagatctttaacctcgcccggagaagtcgcccgcaggtactcgccattaaactttgccgtctcaagcatacaggtatgcgaacaggttccgaacgccagcgcggctgcttcctcacgcactttgaatttccagtgcgccggggatgttgcgtaaatctcgccgaggcttgagccgctaacgtattccgcgcaccaggagttaggatcgtggtaatcatcgttggataattccgcgttggtgtatgccttaaaaattgcttcagccattggtatcactccatttgtggtttcgttgcgttaagtatacgcatgacgattccaggcgcaagtcaaaaagtgctatccgcagttggttaaaaaacgagcgaaatttacgtaagatttagtaagatgcatcttacgtgatttttcctatatatttcatttagttaatgcaaatcggtaagatggtaatatccctataggtaaatatccatgaaaaatatggcgcgaaatccagcgaaaaaagacacgcaccccggagaaatcttaccaagattgatagatacagatagagtaataataataatattgttatttatcatatacttactatctatatattgcggttaattggttaaattttgcgcgaaatttacgtaagattcatcttactaaatcttacctaaagtggttcgaccagctgcaagccactgaatttcaggcataaaaaaaggtaagactgatttgctcaatcttacctaaattctggtcaacatttaatcatagaagcgacgatgccctgtacaacttgcgttcaaatccgagcttaaagttgtcaccgttcggaacgataactttaagatcccgatcgtcagcagccgccagcatatcccgatctccacgacggcaaactacccgcatttctcgcttaccttctccgccattgcctttatacctgtacgccacgatctcgacgtttgaaggtatgatgcaggcccaaacgtcgcacttgaacgaactggcaatattaaagtgcatcgcctcaatccaggatcgagcaaggtaaatcggcccgttaccgtcgtcgctctgattggtcactatcaccgatccgaatgtcagatcgccagccaacatcttctcccgaccctcctcatcaatgaacagcatgttgcaatactcatcatccggcccatcctcatgcactagttgcattggtagcgcgtgaattagctcctgtctgcagttctcgtgagtttttacgccaaccagatatgatttgatatgctcattttcaatgccctcatagagcgttacaggcgtgctatcgacggcctccgttctgtttaaaactgccatcactctttcatgatctgccatctttccgtagtcatacccgttatcacgagctacctgcttgtttctcttgactacgtattcttgcggaacctttccgagatagcgcccaagaatgttgatgcactcgctatacggctggccgcttaacttcattaaccagccgatccccttatcggcaccgcaaccgccacagtatgcgccgccatcacctcgcgtttccagcttgtcagtccagcggaatcggtctttgccgccgcagttcgggcagtcctggtgcttgccgttgaagtatcgagagtggatgccgcaaatgttctgcaacgcctcgcgccacatgccagccatgtacggcaaaacctctttttcatcgtaaaaatccacgtcgtaacccccaaataaaaaacgcctacacgagaatgataacccggcaggcgtttagtgtttagtcaaattgtgctatcggactacgcggagcatttcgcggcggtcgcatcggcgcgtcactggcttgccgttgctgtcaaatcttaaatcaggtcggcagaatgaggcgcgaaaacctttgcaattgttccgtcggtagctcttatgtactagataagcgccatcggctgagatcataccgcgcttacgccactgctgaacaacctggatactaactcccaactcttttgccgttccagcgataccaccgaaggcatcaataaccagctccatccgcgcagtcaacccagctcgaacctcatccttcagcacgtagtaaccagtcggtcgcttgcgtttcttcttatctttcccgcgcgacgttccgttgttgccgttcaaggttcgcttatcaaccattgccatttgctccataattcaaccctcatagcattttttgttaaacctgataaaatgttccatgtattatacacgcaactatgcgaatgacaaattaggattgacaatggcaagcacagaagaagacgtagcatattttaagcgactatttcgttatgaaggcggaacactgattcgcaaagttacaaccagtagtcgtgcattcgctggagactccgtagggtgcgagaacaacgttgggtatttacaggtaagcgtaaaaagcaaacccctatacgttcaccgaatcatttgggaaatgcataatgggcctatcccagaaggaatggagatagatcacatcaaccaggtcagaacagataacagaatcgaaaacctgcgactggtaagccaccaagtaaaccttaaaaaccaatcgatgaacagtggcaatactagcgggcacgctggcgtaagctggtttaagcgaggcggtaagtggagggcaacaataaaggttggcggaaggcaaatacacattggttacttcgcgtcgtttgagtcggcagttgccgcacgaaaagcagcagaaaaacaatatggttttcatgataaccacggagcagagaaaaagaaatgagcttatcgattgagcaacaaatagatctatacgcagacaaaatcccggcaatccaaaagagatttaccgttggaaatatcgttccgtatccatatcaggctgtggcttatattgagacagccaaaagaatagcaaactacaccgcaccgttttacattaaggcttcggtttccgccgggaaaaccatcatgatcgccatgctcgcagcgcagtgcaaggcaatgaacttacccatgatggttcttgctcgccaggccgagatcgtgaagcaggattccgaggagatcagtaacctcgacgttccaaactccgtttattgtgccgggttaggcacgaaggcggcatacttcccgatcgtcgtcggatctgaagggacggtggttaatggcctgtttaaaatgctgggcgactacgtgccttcagttctggctattgacgaatgccaccaggttgactggcaagatctggcggaagcgatcgccaacaatgaatcgttcgagtacatgagccgaccgaaggataagccgtatcgcgtgaacggggaactggtcgatgccgaccacccatacgacgaaaaattcgacgacgtagaattcggcggcggtcgcacgcagtacactatcgtcatttgtgagttaatgcggaggtgccttgagaagacagggcgagaacttcgcatcgttggctatactggttcggagtttcgcggcgtcattccgattttacaggaagacaagagccagcctggtttttggcgcgagcagatcaccgacattaacacaaactatcttgtcgagttcggatcggtggttccgacaatttttggtgatactgaatccgaagggttagggtatgacctatcagaattccacggttccagtcaggacggtacgcaggattttagcgcggaagaattgcgcaagatggaaaagaaaatccatgaatccggcgaaatgacgaagctgattatgcaaaaggtcgtggagcgtgcgaaaacccgaaacggagttctgataacttgcgctggacagcggcattgcaaggaggcggcgagctatctaccgccggacgcaacatacgcgatcatcaccgaaaagacgaactcaaagaaacgcggcgaaattttggataaggcgaatcgcggggagattaaatacatcttccaggtgatggccctaaccactggcgttaacgttccgttttgggatttttcggtgatattgcgcaagatcggatcgcttacgttgcttattcagcttttggggcgaggtatgcggcttctaaaggactggcaaaaacagcctccttactcgtgggtgaaagaagatcaccttgtctgggattttgccggaacaatggatgaccttggccagttgtatttcgatccgattttggagcaggcgcaataccaaagacgcaagagcagcaagaacggccccaaaatttgcccggtatgcaagggagaaaatagcgagtacgcccgccgatgcatccacaaagacagcaacggcaatcgttgcgaatatttctggatatcgcagcgctgcgaagaccagaaagacccgcgaacagggaagattaaggtaaaaggttgttacgccgaaaacgatattgttgcccgccagtgcagatgttgtggggtgcagcttaaagatcccaacgacaatctcaccgggaagcattatacgcagaatgactggtatgatgttgtcgggttcgatatcggcttgactcgcaatcagtccgggatcatcttcaattacgtgttactgaaccatgacggcgagcggttcaccgccagggaaaagttcttcccggaatcagagaatcagatttgcggcaagttgtggcggcaaaaggcagtctcccagcacgttgacgacgcggtaatgcgtggcaagttgggcggtatgaaaaacgcccgcaagatcctggagtatgcggaatacttccgcgcaccgaagcgcgtaacgcatcgcatcaacggcaagaaggaagatattatttcacgcaaagattttggagacgcagaatgatcgcagataaaggtgattatctcgaatactacggcgggcctgtgaaggcttgtccgcttgagaaaatcgatcagatgaatagcgtttcgtggctgcggcacgaataccctgattatctgttctggcacacagtcaatgaaggcagcaagcacaaggcgagcgcggttatcgatcatcaaatgggattgcttaaaggcgttagcgacttcgttatcctgattggtttcggtggcaaatacccgttcgcagccattgagctaaagcgccagggtaaggcgcaggcgtcgccagtgagcaaggagcaaagggaattccttgctgccgcccggcgtcgcggcggattcgccgccgtggcctatggcttcgagcaattcaagattgctttctgcgatgccataaaatagcactttttgttaaaaccgcccggcgaaagccgggtatcatttccacatcgaaacgaagaatggagtgttgaaaatgaaaaagatgctggctttagttgttctgtctcttggtcttattggttgcagcgaaaaaccgaaaacatatgattgcggtggtgaagcgtttgaggtaactagcaactatatgaaagttgtcaagggtgaaaactctggcgttataattgatggcgctggcgaaaatcaatataaactgcttactccttttgggtacgctcattatgcagtcaacaaaaacactattgatgttagcgtgggcgcttttcacaataccttaacctgcgaggttaaataataatggcaaaagatatcgcagacaaagacactcatgacgcattcatcacgtttgagcaattggagcgcgaaacgtttattggcaacgcccttgccactggcggacactatcaagccgtcaggccagataagttctatcaggtaactggcaaccgatacgcaggtagtaaaacgccggatattgtgcgcgacaagtgggcgacagatcgaagtctgatcgcatacatggaagagcgttacggcaattacgatcttgatgtcgccgcagaccgaagcaacgcagtttgcccgaagttctacgacgaaaaaacggattgccttaaacgctggtgggggaaaaacaagcacatttggctgaatcctccttactcgtttccagatccgtttattctcaaggccattgagcaaatggagcacgacaaccagatcgacattctgctacccggcgacaattctactgcctggttccgtgacgcgcagaagatggccgccgaaattatctggattgttgccgatgttgaagaggatgattacgggaacaagttaagtcgatccggtcgcctcgccttcatcaatggattaagcgggaatccagtcgacaacaacaataagggaagtgttattttcatcatgcgcaagctcaagccgggagaggagcaaaagacactttacattccggtaagcgagatttgcccgtcattagctaaaaagcgtatgcgcaaacgtgggatctgaaaaatggaacagacagagtctttcgccgagtatcttcggatcgttgttgaacttctggacaagcacggcttcattgggacggatgaggaaaagttagcctttgctgacaccatcgacggaacctacatggagttcatggacaacggaaccccggtcgctgactggccagaaattcttgaacgagaattgattgagtttaaatcacatgaaggcgcggagtatttcgcaaaacagcactaattgctaaacaatacccgccgcgtgcgggtattattactccaccaaccaatcaggagcaaacgccatgaaaaccaaaaccattgcagacaccatcaagatcgtaccagtaaaagcgcaagtggtatcgcgtcaactggttaacctgtctcgcctgtgcatggccgactacatggcgaacccttcagataattgccttgatggtgtagtcggtgagatttattttcgcgctggttatggactggaaagcgtggccatgtatgagcaaatggccgaaggtttttgcatttacggtgacgaatgatgattgtcgagactggtcgcgctgccgtatggcagcacgcaaaagaagcgggaataagtgatgatatcgtgaagatctcaaagtatttcgatatcaaagatatatcaattatctttggtgggaagctcacctatctaaacgagcgcccggtgaagcgcacgcgaatagcagtggcaacgcgtgcggaggccgacgcgctgaagatgttcatacatgagtcgaaacagcagaaaaaatattacaagtagcgggggcgtgaagaatgcgatatattgcgatcctatttacggcgatcctgttcacgatcgcaatcatgaactgcgcaattcaattaggataaattatgttaccgaaaatcacagacgaagaattcttagccgcccgcgaggaaggtaagacctaccgcgagatcgcggaagagttcggcatgaacattcgaagcgttgaacgtcgtggcgttcgcctggcacgacaaggacacctacacggaaacgcccacgtttcgaagcatatcccggacggcttcggcgtcaaaggcacgtcgacgatgattcgcgcggacggctccgaggtcgttcggtgggtcaagtcggaagtagacagagatcgcatggtcgcgcttatggaggcggcgcaggcggctttctgcgaagaccttccgcgagctgaaccgcaaccgctggatgagtcgaagttctacattgaagatcagcttgccctgtacccaatcttcgacctgcatattggggctatggcgcataagcatgaatgcggcgagaactatgataccagcacggcagagaaggttctaaaccgcttctttgattattccgtgtcggtggctccgcaatccaaaaaggctgttttgctggttggcggtgacttccttcacagcgacggcctggacgcagtaaccccggcaagtggtcacgttctcgatcaggacagccgatacgcaaaacttgtttatgttgccatccgctcgctgcgtcgcgccgtgtcgctactgcttaacaatcatgccgaagttgaagtgcaggtaatcgaaggcaaccacgaccaggccgggatgatttggctacgcgcagcgctggcggcgttctatgagaatgaaccgcgcgtttttgttgatgttagccctgcgatcctgcatcgcaccttgtggggcaaaaccatgctgggctacacgcatggccacacgatgaagaagcctgaaacgcgccttgctgcgatggctaccgacttccgcaaggagttcggccagtgcgactacatttacacgcattccggccactggcatcaccagactgtaacggaacactcgttaggtattgacgaggtgcatggccagttaggggccaaagacgcttacgccgctcgcggtggttggcgctcctatcgccaggcggcggttattctgtacagcaaagaatatggcgaagtaggccgctttatctaccgcccgaacatgtaaccacaacggccccgcgaggggccaacaaggaaaaccgatgaatagaaatatctgcattttcgatctcgatggcacgttgtccaatggcaaccaccgcttgcacctgctgccgaaaaaggatctccaccttacagaaagttggagtgaatttaatggtgcatcaattggcgacagcccaatccaaagcacaattgatgtagcgaatgcgcttcatcgctccgggatgattgtcgttatcctgaccgggcgatccgatgaggtgaagaccgaaacaatgatttggcttgaccgttacggggtgaaatatgacaggctcatcatgcgtcgcgccagcgacaaccgtaaagacacggtaatcaaggaggaggagttacgcaaaatcggaattgatcgcattgttgcggcatgggatgattcacccaatgttattgcgcacttgcgcggcctgggtattacgacttaccaggtctgcgactacggagacaatcttcaagatcatttaaaatcgcacggagtagacaaatgaaaaatgtaattattctcaacggagcacccggaatcggaaaagataccatcgcggaaattatctcgcggaagtgggaatacaagaaccttagcttcaaacagcctatgtttgccatcgcgcgtgctgtgcttggatctactgattttgcacgctttaccgccagataccacgaccgcaagcacaaagaagtgaaatgcgattttttgggcgaccgttctccgcgtgaattcatgattcacattagcgaaaacttcgtcaagccgaccctgggcaaaaatcagttcggcaagttgctttgcgattcagcgctaacttcgccgtttaactgcatcgtcagcgacggcggttttgatgaggaggtcgagcacgtcgcagcgcatgaggcgcttaacgtatttgtcgtccgccttcatcgtgacggcatgacctttgagggtgatagccgcaaacacattcgacgacccgatctgatttgtgacacgtatcacgaacttgattttgatatgaccactggcgagcctgaagacgacgcgcaaaaaatccttgatatggtttcagatgttgcattaaaattataaagttaatgcctttattatcaccaccttaacgattgggaaccttgacgggttcccttttttttgttcttaattttgccaaatgaatatatcatcaccttaccatttaactaacagaggttgcatatcatgcgggaattcatcaacgcggcaaccaatagcagcggcggtgttgcccttgcgggatctgcatccgggcaattaatcattgctgccattggtttatttttcatgatcttatttggctcaatcggcacgtggctgaagtggaaagactcaaaagccatccgggaggcgattgattctggcgacattaaagaggcattgaggatcaggagcaaataaaatgggaatgaaaacgcggcttactttcgcggcggcggtggcgatcgcggtcgcgttcctccccgaagtggaggacactaaatacacggtttatacggatatcgctggcgtaccaactgtatgcgaaggaatcacaggcccggacgttatcaaggggaaaacctatacccggtcagagtgcgacgcgcttttaaccaagcatatccaggtagcaaagcgaaccgttgacagcaaaatcaaagtagatgttcctgacaccttcagggcgtcgatgtacagcttcacgttcaacgctggcggcggcgcatattctggcagcaccatgctgaaattaacgaaccagggccgattgcgcgaggcgtgcgagcagctatatcgctggacgtactaccgcaacccgaaaacgggtaagatggagaagtcaaaaggcttgcataatcgccgggttcaggaatatcaactatgcattaaggatctaaaatgattaaggtaattggtgtggctcttacggttgttcttctgtctggttgcgcttccagtgtcccgatcctttccgatctggtgggcagcaagccggatatgacggcgcaagtaggcgcggagaacgttaaacaggcggttggcgtgacgaacaaaacggacacgtcaagcaagcaggagactacgttcaaagagtcggcggtaggaaaggttgacacgtcgaacaaaaaatccgtaacgacctccagcattcacgccaaccagatcacggcggacaagatcgagatccgaaacgatgaaagcggaagcctgactccgtggctgattggtggtgttggggttgtaatgctggcgataggtgcgttcggtctttggcgggaacgaaaaaacaaaggggcgtaatgcccctttttctatatgtaccgcttgacgtgcaatagcgctactccgtcttcatcgttaagaccatgttcaaccgtgttggttgcagccattccttgatagagcaagatgagcgcggcacgcaagtaattttctggtgtgatctgtttcacacaaacaagcctgtgaacttccgttatcagatcttccacctggtttcccgaaaagctgttcatcactgagttggtcaaggtgcatcatctcccatatgtatcggttatccatcccttcgaacgaccggaaatcaaaacctatttccctgttatccggccccgtacaccacacagagccgttttttccgtcaaggtatccattcgtatagcttcgcgctaaaaactccttagagaccattgaggcgaacatacgttgcgatacgttggcggcttttgccagtcgaggcgcttcgcggtgcgtatagacgaacttcgcaaaatcctgccgggtgaactcccggcgagattcgcagaacttgtaaatgtcaagaataaacatcaattacctcatgaacgacgggttgataaagacttcggaatccatcacgcagataaagcctaattcctccatcttcggcaataagcgttccttaatctttttgctcaccccggcctggcctttgaagatcttcaggttgcggcaggcgttataaatgccctggacggtcataacaccttttgcctgtttgcagcgactggcgataacgtcatacatcgctttaatttccgctccctcaccagcaaagccggaagagtcagccgacgacaaatacgttttgctcaattcatggaacataatgatcgcttcgtcaatggtcgccgtgtcgatcttcttcgagcgcttcccgccgggttgccagttccggatcgtgtgaatcacggacgccagacgcataacctgcttatcaaacttacccatcgcgccgcgaagcattgtatgcgaatacttgccgccgtcgcctaactccggttctaactcctggcgggccttgttcagcctacgcattgccgcgtcagtaacctgcaacttaatgttcgactcgctcataatgtcatgaatcagccggaagtaatccgccttcagtgactggtcgatcggctcataggtcgaattcccgttttcgtcgatgaacacgcgttcacccaaacgggtttgctcacgaaccaaaaggaagcgttcagataccccgatcccgcgagagccggcctgcataatggcgtcgatggtttcatcctgggcaattacgcaaatgcagcccaaagcctcgaatgacatattgttgctaacgtcggcacgagcgatcgatacgtggcctttatcccatgctttgagcaccagttcgctgttcgtcttcttaccgccatcgtttccatacgtgatccctaaaaggctgttaaccgccgtcgcctcatcggaaataacggcaaagtttccctgtcggttgttaatcttcgccagaccttccggggtggtatcagataccgggaaagttaggtcacacaatttttctaacttctcctcaagttcgtcacggtcttcaaaaagtttcaccatatcagattgcgataactccccttttagcgcctgcttgttggcggacagcttcgccatgattttcttacgctctttctttcgagactcgttaatgcgttcgacttcggcgacaataggatcgatggcaagcgagttaatggcagacttaccagcggaaggcggctgcgacgtgataacgtaaagcgttgtcggttgctcgctgccgtggtactcgacccaaaagcggcccatcatcgcggcggatacggttccgagaaagtgcatgtaagcggatgattccgggaactgaacagaacgcgctgcatttagcgccagcttgccgacaacatcataatcattggcgatcgagattgttggatacttatccgcgtttacgtcgatatctttgggctttggccagaatgaaacggagtcacgatacccgttcgcacgaatcgcaacgcgcaggggactgatcccctccctttctgcgatggcgataatatcttgcggtgatacgcggtcatttaaaaacatgcccttgctcctgattggttaatcgttcggctaatcatatgccgtattaaatccgagatccagtgataatctaaacacgcttgaaaaacgcgcttggattatcggggcgcatggccccgaacccgtcacaggtatttagcttcgaaagtcgttccgtccgatacactgaagccaacttcctcgcggtacagcgtccagcggcatccatcacgatcgaagatgtatccggcaaccgcgccgagcgcacgaccgctttctacctggtagcgcttgccgacgctgaaggattttttcatcgggttgctatggtcaaggccgacgcattttagcgttttggtttttagttcgatgaacgtcgcaatcacctggccaccagcgccagcaataaacaactcgccgctaacgcctaccgacaaaataacgcgcttcttcttcagttcgacgctgtcatataccatcattgacacattgccttcatcgtcgacgcgggcgggataaaggttattttcgtgtatattaatagcgcggcttgacgtgcatttaatcttgattgacttcgccatttattttctttctccgatctcgatgtacaggtttaccaaatccagaaagtcagccttgcttttgcaacccaacttaaagccaacgtgcgactcaattttattttgcatcgcagccagtgttgcgccgccattattcatcctgagaacttcgcggcatacttcggcgagcttttgagatatcatttcttcaccacctttatttccatgccttcgcaagcgctcttgatatcattaatcagacgattaagccttaaatcagtcattacatggtgatgacgtatatcaataattccagcaacgactaacagcatgacggcaaagataaaaccaccaggcccggacatacacaaaacagttaacatcatcaagataataaatttcatttccgttttactccgttgcgtttcgatggggtgattctacccgactttcgccgggtagttttagaaattcgtgctattctcgataattcgcctggaacacggcgcgggcaaaacctcgcggagtaatggaacgcagcattttagtcctttctgaccttccacccaaaaacttccaggcccaaaagaaattcacgccttctactccatccggcggcgtgagccgtttcggttcgacaaaaccgtttccgtgccatatgcacgttttcttcgtgtaattgtcacagtggggcattttgggatgccacacaggctcgttcggagaaacatagccaccgaagtcgcgcggatggaaataaaaatccggctttcgccatagtgacgataatttcccgaccgggttttcgaccatccaggggcaaccatacttattgcctaattgctcgaccatcttcgcatcccctgctgcggataatacgtcattatcttcccttacgtgcttgattccgctatgcgctaacagcgtgcatggcgggaaagcgaaaatgaagtcaggatctggaatgccgagaatcgatcgcttaacgtcaaaatccttgtcaatccaaatgttaacatactggatatttgggtgaaccattcgaatgctatattctccgtggtcgccggagtcggcgttgaaacagtacaccttgcatcccttgatggcccacggcaggcccatgatgccggagccgtcgaacatgcagtaaataaccttttctttcatgctttccacgcctcaatgaacattctgttcgattccagcgtcagcgtgacgccagccagggaggactgaatgagacgaccgcccggaaccgtcccgatgatgtagcggcctttcgacttcgtgatcgtgatctgagtgaagccggaggcgcggttcatgcggagaacgacgcggccatgagcgttcaggacggcgagaatggaatcagtcttcggatggttcattgtgtagctccttcgtttgttggtatggggacagtatgccactatcccgctgtgttgttttagcaaaacgtgctattccggaacgcaggtcgcgtaatcctggctgatgtagatcgtgcgctgaacgcgaggttcgagatcaccgagttcctggatggtaacatcgttgcttcctacccggcacggaaccgatccgaaaataaactcgccagtctgcttgtcgttgatttgccatacattaccgccttcctttttgacaaccaggaaaggcgcactgtctgcactgaactcttccgggccacgaccgtagtaatgcgtgatcgcagctttggccgcagcgctgaaggcatcggtaacgtcattggtcgccttgtctcggatggccttgatacgttcttcaggcgatccgatgatgtaggaaaagctgttcgaaatggtaactgttcgcattatattttaacctcgttttggtggatgaagtcggcgacgtaatggcattcgatcgggttctcgatacccgccagcacctcgcaagacccgttattcagtagctggcaatgctggcactccgcaccgccaacactggcaatgacaatggcgatcccgttgcatgaaccgccgaacattcgatgagggaagtggtaagcatcgcaggtgcaaaccacctccccggcccgccgtttcctcatacctggcccttctcgatgcagaaaacccaatcacgagcgtcaaccgcaaagcgtgcaacgccgtcgagcaccacgaagacagtaaacccgttgacgccgcgacccttctcgatatcggtcacggtgcggaacagatcgcttgcgccatattgaattttatccccgacgactacatccgcaaatgctttcatggttaatctcctgactggtttcgatgggttaactataccaggcctcgcggcccggcgtttagcaattcgtgcttatttcactgctttcttcgctgccttgtacgcctctttgaaagccggaacatcttcgaccggaatccagaagccggagccatagccatcgtcatagcaagggcattggtcgcagtagtcgccccaggttttctcttctccgccgacagagaatccagtgggcattttgcataacgcttcctcaaccgcttcgatcttgtcggcgtcgctatccatgataacgaagttccacttgccgttatactcgctgcccaggttgattgattcgcgttgaagtttcatagctttagcccctttggctcaattcgtttcgttgaagtcatcatagcaaagccgatcggatggattttaacaaaaaatgctattcctgcgattgctgattattccaccgattcggaatagtggaatagatggtgattgcacctgattccctggtgattagttttgacgaatcatgattgcttttgattgtttcattttgtgcaacgattttgtgagtgtttcaggatttgcaacgaattgcata

SEQ ID NO: 242 - DNA, 49450 bp, synthetic construct
  source 1..49450: mol_type = other DNA
atgtctgaagaacgtagaaaacgcgtaacgaaatcgcactttgcaggcaactttaaagcgctatatgaaaaggagttcggcgtggtgctagggcgcacggcagagatgacgccggaacaattttttgatatcgcaaagcgttacttccagtgggccgaagataacgcaatcaaggctgcggagacggcaacgtttcagggcgacgttaacgagtggggagtgaacaagcctcgaatttttacgctaacagggttaagcctgttttgcggcgtgaaccagtcaacgcttacacgctatcgccacgatcctaactatgctcccgtcatggagttcatcgactccgtgatctatgagcagaaatttcagcttgctgccgtcggcatgattaacgcttctttcgtcggaaaagagatggggatcgataagccaccagtgctgaacatcgacgctatcgccggggataagaacgagatcaccgaagagaggttagagaaggcagtgaccaatattcttgataagctgtaagggtcagatatgaacgaaatgatcatttgggaagacctgtcgccagccgataagctggcaattaaggcgcttagtacgcgcaacttttcgctattcatgaagatctggtttcagatcatccagggagaaaagctgatgtggaactggcatcactcctacttttgccacacggttgatgaaattatcgccgggaagcgcaagagcacgatcgttaacgttgcgccaggctccacaaagacggaggcgttctcaatccacctcgcgccgtatgcgtatcttaaatgccggaaggttcgaaaccttcagatctcgcagggtgacgcgctgtcaaaaggcaactccgatcgcgtgattaagatcttctcatctaacgagtggcaggagctatggccatcaaagttcgggcgcaagcagatcgatgaatttcaggtcatggacgataacgaccgcgtaaggctggaaatggtctcccgttcgtccggcggtcagatcgtcggtaagcgtggcgggtacatgacgccaggtttcagcggccttatcgcgctggatgatatcgacaaaccggatgatatgttctcgaaggtgaagcgtgagaaaaaccacgtactcctgaagaacaccattcgatcccgtcgagcgaagaagaagaaaggagacgaaacgccgatcctttccgtgcagcagcgattgcacgcgcaggattccacctggttcatgatgagcggcggcatggccatcgacttcgatcggattgttatcccggcgatggtaacgcgggaatatggcgaatcactccctgactggttgcgacctgagttcgagcgcgacgtgctttccggcccgtcggtggtaattgacggcgtggaatactggtcattttgggaggaaaacgaatcgatcgagaacctggttgcgctacgcgaagccgatctttatacgttcctttcgcagtatcagcaggaaccgatcgccctgggtggcaacgtgttcaagtcggagtggtggcgctattacggcgattccgacaaggcgcacgagccgcgcccggacaagttcgaatatacgttcatcacggcggacaccgcgcagaaggtcaaggagctaaacgactactctgtaatgtgctattggggcaagtatcgggatcgcgtctacttcattgacggaattcgcggaaaatgggaagcgccagatctccgcgttcaggccgaagcattcatcaagcagtgctggcgtcggaacaaggagtgcggaaaccttcgccggatctacatcgaagacaaggcgagcggtacaggtctaatccaggatttaacgaaggcggtaaacggcatgggcgagatcgtcccggtgcagcgcgataaagataaggtcactcgcgctatggatgcacaaccaatcatcaagggtgggcgtgtcgtgctgccggacaatcacccattcgttgcagagcttgaggcggagatgagcgcgtttacatatgacgattctcatccacacgatgatatttgcgacaacgtgtttgacgccgcaaacctggaaatgaacctgagcgacgatccggtagagcgaatgaaacgccttgcgggattgaaaaagctgggtcgctaatacataatgtgggcctgacggcccacacttaaacaaggttgaaatatgaataacattaagatggacgactataatcaaatctttaatggtggcgctggttatgcgtcaaccctcgcgtctatcgcggcaagatttggaacaatgtcgcaggttgaagagttctatcatgaaaacggcatggcgaagaaaatcgttgacgtgatcccggaagagatggtcgctcccggcttccagctaaacggcatttcagataacaccaagtttcaatctgaatgggacgggttaaatctggagccgcaaatcaccgatgctctttgctgggctaggctgtatggtggctcctacgtcctggcgatggttaacgatggtcgcgcattgacttcggcagcgaagcggggtaagccactcgaatctatcgttgtttacgaccatgattccgtttccgtcgcagaggaggaaaccagtccgcgaagcccacgattcggaaagcctaaaatgtacgaggtgaagccgctaaacggcgggcaaccgttcaaggtgcattatacccgtatgcactacatcgacggcgagcgcgtaaccaacaaggtgcgcaagctaaataatggcgctggtggctcggtgctgaacaagtcgattattgaagcgattcttgattacgactattcggaatatctggcgacgcaactactgaagcgcaagcagcagggcgtttggaaggcgaaaggcctggcgctaatctgcgacgacaaagaaggcgagtacgccgcccggttgcgcatggcgcaggttgatgctaattccggcgtcggaaacacgatcggtattgatgcggacgacgaagagtacaccgttatcaactccgatatttcaggcatcccggaattcctttccgcgaaaatggatcggattgtcgccctgtcaggcattcacgagatcgtgctaaaaaacaaaaacactggtggcgtaagtgcaagccagaacacggcgctacagacgttctacaaactggttgaccgcaagcgcaatgacgattacaagccgctgttagaattcctgttacagttcatcgtaacggaggatgaatacagcgtcgagttcgaaccgttgtcgctgcctaccgatgcggagaaagcggatatcttccagaagaacgccaacgcggctcgcagcctcgttaccgaccaggttattgacgccaacgaagcgcgtgatactctgtcggcgttgattcctgaactgaagctaaaaggcaacgctccgaagcagaaaaaacttccggatcgcgccgctggttcaggcagcacgcaaagcgcagagatcttaaacaacacggaggcggatgatgaaagttaacggcagaatcccaaactggcgttatcctgaagcaagcgagcgggagttatcccgctcaatgcaggacgcggtgacagaactcgtggtagaaatgcgggatcgcttagaccgccttaaatttgacgccacggctgaggaaatcagccaggcggaagacgatatcagcgaatctgccatcgtgttcttttccgccgtaattgcggcgctttcctccattgggttgactatctatagattcaattctaaacagtggcttgcaattgcgatcgcggctggcgggcggaacaacgaatcagttatgcgccttaaagaattcggtgctggtgggtatgaagactggtatcaggaatcgctaaataagtggcaggattacgccgaagcgtcaatcaggaagttagcaagcgatatagttgctgactggacaacgaaagttagaaccgccaacaacattggcaagtctcgcaagcagatcgatgaaatcatcgaaggtcgatacgctatctatggtagttggtcgcgcaaccgggcaagcggaatcatcggaacttttaacagtatgttgatgatgcagcgcctaaaagatgctaaagtgtcgcattacttttggttcggcatgatggatgaccgcgagcgcgaaagccatatcaagctagaaggtaagcgacgccctgttaatggtgatggcattttccccggcgaggagtacggttgccgttgctgggcggttccgtcatttgataatgaggatgattgatggttaactttaatgattactttaatcacgtaggaaaggatctgatatggaagcgagcaacatcaaaccgagtaaaagttggtgatgttgccgggtggaaagatgagcatgggtatgtatacattagattcatgggcaaactgcgacaagctcaccggatcatttgggaaatgcaccacggcacaatacccgaaggaatggaaatcgatcatattaaccatgtaacggacgataacaggatcgagaatttaaggcttgtaaccagaaaggaaaactgtaaaaacgtatcaatgagcgtaacaaacaagagtggagttgtcggcgtgagttggtgcaagagaacaggtaaatggtttgcatccataagggttgataaaaaagagcgattcttaggtagatacgaagacaaaaacgaagccatttcagcaagagaggcggcagaggtaaaatacaatttccataaaaatcacggagataaaaaatgaaaagagttcaaaggttcgacacggtaaagatgaaggcccgatttgatgagaatggctttctggttgacactccgattgtggcgcgtatcggtgcgcaaacgtaccagacgccaaccgggccgcgagtcgagttccgcccgcgttctgaggtgtttgatgctgaatcgctggcttcataccagggaaagccgatcactttgggtcacaagatggttaacgcgcagaatgcgaaaggcctggttgttggctcgtgttccggcgctggcaaagaagaagggatcggggttctcgttccggtaatgatttacgacggcgaggcaatcgagcaagcgaagaagcgcgttgccgctgaattgtcggttggttacacttcggcagatatcgatcgtaagggttggggaaacaacgccactggcgaatatcacttcgatgatgaactaccggaaaacttcgaagagatgaaaaatgattccgtctctgattgggttcgctttgatgcggtgcaaacgaagattcgcgtgaatcacgtcgcgcttgttttccgtgggcgagcagggattgcgaaattaaatcttgatagcgaacaagaattcccctatgatgacgactcaaaccacaaaggagctaaaacaatgatcattaaaattgacggcgtagatgttgaagtggccgataacgtaggcgcttacattgccaaactagacgcgcaagttgcatcggcaaccagtcaggtaacgagcatcaccgcagagcgcgacgcacttcaaaccaaagttgatggcattgaagatgaagttgccgcccgcgttgctaaaatcaaagccgacgaagacgcaaaacagaaagttatcgcagttgtttctgccgctggcgtcaagtgtgacggcctggatgttaaggcaatgaaagttgcttacatcaaagaggtagacggtcgtgatctgtctgacaaagaagattcgtacatcgacgcttcttttgactttatcgccaactctgataagatggctggcaatcgctccaaagtcttcggcaaaaaagaagatggcgagcaaaaagacaaaggcggcttaccgaaacttgacggcaccgaaatcatcgatccgcaggcaaaattccgccgctaataatttgcggccttcgggccgctaccagaccaaataaacaggagattcaaaatggcacagattccagcttcttattcccgcaagcgtgatattgctgtagcggggcagatcgctgatacgtcactttacaatatcgacggaacttgtgttgctgaaggcgatatcaaagctggcgtactggtggcttccactggcgcagtttccaatggccacaaggtagttaaaccagcaaccgcagcgagcgacgtcattgtaggcatctcgcagttctcgcaagcctactcgcctgaaggcaagtatgacgatgagagcgcagttaacgttatgactcatggccgcatttgggcgatcgctgacgcaactgttactgaagaagattgcgcgttcggttctttcgtcacctttaccgcaaacggcacagtagcgaagggtgatgccggggttatcaaaactggctacaaacacactggcgaatacaccaaaaacgcagatggcactgttctggtgaaagtgcaggtgctttagggcgctgtagctccagcggctacaactggcgacgctggcgtataaaataaggggcttcggccccatttttgcaccagaaaaaaacctttgacggcttaacgattcgtgatattcttcatctcgttaagctaaatacacaaacaggagttttcagatgactatgaaattagatgcattcgaacagagtgccattaaggtcgcaatgcagggcatgggcattgatgccgcaaaactggatgcttacggtatctggactgttaagcagatgactcaattactgaatcgccagtatgagcaggcatacccgcagaccagcgcacttgagcttttcccggtaactaccgagatctcgccgaccgcccgccgctttgagtggctcgaattcgatggcgtaacttctgcgaaaattatcgccgattacaccgacgacctgccgaccgttgaagcgatggcgaaagagaagtcagggaaagttttccgcctgggtaacgcgtggtttatttccatcgacgaaattaaaactggcgcggcgctgggttccagcctgagcgatcgcaaggcaactctggcccgcgaaggtcatgagacgctcgttaatgatctggtgttcaaaggatccgctcctcacggcatcgttagcgttttcgaccatccgaacattaaccgcatgaccgccagcgcggcttggggcgatgacgcagcagcggctgaaaaggcattcgaagatctggaagacctgctaaacatgatcgaagaaactacgctgggccgccatcacgcgaccaacatcgtgattcctccgtctaagcgtcgtcttctgacgaaaaagatgcctgacactagcggcgactcttatctgacctggttcaccaagaaccacccgaacatcaccattacggcgatggcggagctggaagatattgacggcgcaggcaccaaaggcgtgctggcatacgaaaaagacccaatgaacatgagcatcgagatccctgagcggttcaacatgctgccgatgcagccgaaagacctgcatttcaaagttccgtgcacctccaaatgcactggtctcatcgtgtaccgcccgctgactattgcgattctcaccgggatttaatcaaaagcgccttcgggcgcttttttattgcattgcattctgcaatgtgctttaatttgaaacctaaagtaaaccaatggagcattaacaatggccagtaaaaaagaaaccgtagaaaccgtagaaaccgtcgaaaccgtagaaaccaccagtgccgaacaggcgtcgcaggttgttcaactacaaaacgttggtgcatgtgcaattcgctataaaggcaaaaattacgtctatgagcaggtttttgaagtgccggaaaacgaaatcgaccgattccgccacgaaatcttcaaaggccgggtcgaattctacgacaatccgaaacgcacgcgcgaatacatcgcagcggtgaaggcgaaagcgaaagagatcgtgcagcctaaaagcgcggaataacaaaaactaacaaagggcgcttcggcgtcctttttcatatcaggagagcgaccatgaattacacaattcaagatgtgatcgataaaatgcgcagccttgcacctccgcttaaagaagttccagatgaactgctgtctgcgtgggttgtgcttgccgaagagttcgtttgcaaatccaggttcggggattccatcgttacggcgatcgcattgatgaccatgcacctaatgtttttggatggagcgatgaagcaggaaggcgaaagcctggaatcttacacgcagcgagtggcatcgttcaccctgaccggggagttttcccaaaccttcgatcgcgtatcggcgtcaagcgacaacgaaatgctttctacgccgtggggcaaaatgtactggcgtatgctcaaaatgcgaggcggtggcttcggcctccttaccgccgggaacgtgcgccgctgcggaattggtaggtgatcgctatgaactacaaacaaatccaggcacgcgcaagcgcgggcattaagtttttcagtgacgctgacggcgtattcaacaagtacacgaaaggcgctggcggcggaatcgatccggaaaccggggaagatatcattcctggcgaggtggtaacgacaatcaagggcgcgatcagggatgtaaattaccgtgacattaacggcgaaaccatcctcgctggcgataagcgcgggtttttcactcatgatgtgccaatcatggagggtgacgaaatcgaagtagacggcgagcgctaccgcgtggttaatgcccgtccggtaaaaccaacgggaaccgttgttgcttaccgtccagttttgcgcagggtggcgacttatggctaattacacgatccgggagttcacaggggcaattgatgcatggtgtaaggccgctggtgatgcgctggaggacgttgtaaggtttacgtgtgaagatattcaccgcgacctcgtaatgcgttctccggtggatacagggcgcttccgtggtaactggcaaatcacctttaaccgcgccccgctttacgcgattaacgcatatgaccaaactggcgaaaagacaatccagaacggcaaagccaacattgcactatacgcaaaaggggctgggatcacttcgatctggttcagtaacatgctaatctatgcgaacgcgctggaatacggccattcaaagcaggctcccaatggtgttatgggagttgttgcgatccggttgggcgtttatgttactgaggcaatcaagcgagcgagggcgaaaaatgcattatgagatggcgttaaaatgcaaggcggcagtggctaaatttgccgccgagaacgggttaatggtcgcaggagataacgttgactttaagccaccaaaacacggtgaaacttatctcaagttctcctacgtagaagcggattccagatctgtcagcctttccagaacttgccgcgtttatctggctatggtgcagattgacgttgttttcaaacccgggatcggaaccgacgccgcgcggctaatcgcgcaaaacgttgcaaaatccttccccgaaggcaaggttgttgattctgaaagtaagttatatgtgagcgagtgggcggaagtgtaccgcgttcagaaacacgaaacaggctggctcctacccgttcgcttcacagtaagatgcgaaagcgcggaggagagcggttatccatcaacatgactggtcttagaggtgcttataatttcttgccagcctgtaaatatataggcataatggcgttgttaaactttcatcaaaacaggagtattcaacatgcatttaccaaacggtgcaaaggtcttctttgagaaggctcgcggtgcggccattccgtttaccgcaatgaccaacgacgcgaaaaacccaaaaatcacagtggcggacggcaagctgaaggtgaaagatattgtgatcttcaccgattgcacctggggcgacttcgttaacaaggtggctcgcgtaaaagcagtgacagcaggtgtggcaacgctggaagagttcgatacctccgacactaacaagtatccgggcggcgcggccactggtaacgtgagcgtgatcactgattgggtcgaattgccttgcattcaggatttaggcaaagacggcaacgaacagcagttctataactatcagtgccttggcgatgagcgcgagcaatcagaacctacttacaagtcggcggtgacgcttaactacacgtttgcgcacgattacagtaacgcgatctaccctgtgttgcgttcagccgacgccagcaagcaggcgagagcgatgtacatgtatatcccgcgagcttccgaggttcgttactggtctggaattgcatctttcgatgacattccttccacggctgttaacgagatggaaacggtaacgcttaacattgcgcttaaaggtgctcacgtcttccttccggttgtcgtgtaattaaatggcggggcttgtgcctcgcctttttttgtgcataatagcgaataacacaaaccaatcaggagttaacaaaatggctaaattcaaaattcaaattggcggcaacctcccttctttcaaactgcccgtaaccttcacttgcccggatggcaaagaagcgaccatcaccatgaccgtaaaacatcgctccaccgatgagatgaaagacttttatgagagcgaagataaagcgccaaagggtaacgccgagtttatccgctttatggccgaaggctgggatcttgatgatgagttcaacgacgaaaacatttcctggctttgcgctcacttcccggcgttcgtcatggcactgccacaaacttacatggccgcgcttgcgggccaccgtgcaaaagtttaaggcgggctgtttatctcacgcttcagcctgagctaaccgatcgccagcttgccgagtacgggttaaggcgatcggattatgaggcagatcttgaaacgatctactttgatgaacagaccgcccaaagctggcagctattccaggccatgcaaacgcagtggcgcattgggatgaacggcccaacggggcttgactataatacattgcctatgttcttcgaattgtataaaatcgacaatcgagaagcggcattacttgacttgcaaatccttgagggtgaatatctgaaggagatttacaagaaatcaaaataagcgcctacgggcgcttttttcatatgggggctaaacatggctgataaagtagctgggttgacgtttggcgttgacgtttcgcaggttgataaagcggtacgatcactagcagaactgaaaaaccaaagccagcaaacaggcgctggcctacagtcacttgcggacgctgaaaggcgggccacggcgcagaccgaggaaatgaaccgcgcgttgcagcgccagaagcaagagactgacaaatcaaaaaccagctttagcaggatcgcaagcgccatcgatccaacgatcgcaaaaatggccaacttgcgcaaagcgacggaagaacttgataaagcgtgggcgctgggtcttgttccggacaaggaatttttccgccttggcgctatcatcgagtctaccaccaaccaactccggcggcagcaggcggcgctaaccgaagaaggtcgcgcagcaatcgcagaggcggaggcaaagcagaaggcggcaaacgccgggcgtgattttgtcgccagtctgaaacagcaggctgactccatcgggaaaacacgcgccgaactgctggaaatgaaggcggcgcaattgggtgtatctgcggaagcggccccgttcattaatgccctgaagcagcaagagcaggcgttaaagaaacagcagaatgcgatgggcctggctggcatttctgccgggcaatataaaatggccatgcgccagttaccgatgcagatcacggatattgtaacttcccttgcgtcaggtatgccaatctggctggttgcggtgcagcagggcgggcaaatcaaggacagcttcggcggcttgagcaatacgtttaaggtattgttgagctacattaacccgctaacggttggtgctgcgtcgttgggtatcgccctggcggcaatcgctaaagctggttatgactcctggaaagcgcaacgagaactggcgaatgcgctggtgctgactggtggctatgctgcgaccaccaccgggcagatcacagccttaaccgaagagattaacaaaaactcatcggctacgattggcagcattcaggaaatcgcaacatcgctcgccagttctggtaagtacacaatcaaccagattaagcagatcacgaagactacggcggaatggtcggcgcagacgggtgagagcgagaagacgatcacagggtattttgattcgatcgcaaaagaccctgttaaggggcttgccgatctcaatgagcagtttaatttcctgaaagagggccagctaacctacatcgaatctttgcgtaaaaccaaaggcgagacggcagcagcagaggcggctacaaaactgtttgctgatactatggataagcgccttaaagatatcgcggacagcgcaacgccactcgaaacgatgtggacggatatcaaaaaatgggccgctgactcatggaaatgggtaggcgatcacacggtaggggcgctaaaccttatcgttgatacggtttccgcgatcattaacacgatcaggaagctgattgccgacggcgacgccatgatcgcgcagttcatcgttgacgctggccggaagctgcaaaaaattccaggaatgggcgactttggcaatgaatttctggcgcagcaggagcagctaatcaaggactcgaaagcgaaatccgacacgcttgcaaaaaccattgcggaacagcaggcaaggatcgcaaaaggcgaaatgggttacattgatgccgcgaaggataaaaccctttccggtgggtacagcagcaaaacgaaggatcgcgtaaatcaggaagaaaaagatatcctgaaaaaccgcaacgccaggaagcagcaggtagacgcgggcgttaaaattgatgagcagtatcaggctgaactgctatcgctacaggcgcagctaaaggttttgcagcagcacaaagggcttgacgacaagatcagccagcagcgcaaagactacttcgagacggttgctaaattccaggttttggaagaggcaagccagaagcgaaaactgacccaaagcgaacagcagatgctggcgaacaaaaagaatatcctgtacatggcggaacaaaaggccattgtgggagatcagattgttcagcagcagcgactgaacgccttgcttgacaagtctaccaagtatcaaaaccagatggcggagaagaccaaggcgctacaggataccgccggaatgggtagcaaggagcaggagagataccgggccaatgcgcagatggcggctgactggaaaaacaacggcggatctttaagtgaccctggatttaaagcgatgcaggccgcaagcgataaattctacgcacagcaagatgcgcaaatgatgaactggaaggccgggtttactaacgcgtgggctgacattggcgaagaagttaatgacgtatacaccaatatcggggatatcactaaaaacgcatttaacggcatggcgagcgtgctgactgattttgtcatgactggtaaggccagctttagcgacttcgcaaagagcgtgatcactgacattaccaacatgcttatcaagatggcgctgtttaactcgctttctgccgcgtttggtggtggtggaacgttcagcttcgccagcatgttcagcaaaggcttttctggcggcggttacactggcgacggcgggaagtatgagccaaaaggcgttgttcacggcggggaattcgtattcaccaaagaggcgacgcaaaggttaggcccggaaaacctgtaccgactaatgcgcggctatgcaagtggcggcctggttggtggtaacgcaagttccggatctggaatcaccaacggcggcaacgtcgcggcgtcggcggctatggtgtttaccattggtgatattaacatcacgatgggttccggtcaggatagcaaggggctagagcagggcgtaaggcagatcgtgaacgatatgttcaccgaggctttgagccaaaacgggcgcattgcgaagttcgtcaatgagaaaacgaggaggtagtagtggattcctttaaatggtgtacacaaatccaaggaggggcggcgaaagtcgccgtatccaataacgttcgggcgatcagcttcggaaatggctacatccaaactgcgtcgagcggcattaacacaaagcgccggactgttccgatcgtttatggcggttcggattgggaagcggtttataacttctgtcaggatcacgtaacaaagccttttgtgtggaaggcaccggatggaagaatgggcgtgttcgtcgtaactgccgactccgttaaccttgcgccgcagggtggcggggtgtttgaggtaacggctgaattcgccgaacgcttcacttcagccggataatcaaaaagcgccctttacgggtgcttttttttggcctatgatctggagtcaattagaggagggcttacgatgacagccaatgtttcaaaagattttgcgaactgcctacaaaaacttttccccggcgagatcctaacgctgatcgatatcgacgccacaaagttcggcgggcaggtctaccgattccataacgagaacgtcgcctatacaaccgaggagcttttggccgcggttaacggcgggacgcttcagccaaagatgatcacgtttcgcggcgagcagtacggcccgcgaccgttcggcctgggcgggatcgcaatgtcgagcgatggcacagtggaaaagccaacgctgacggttagcaatattgatgcgcaagcgagtgctcttattcgagcctataacggccttatgcaagccaaagttacggtatgggttttggtcaaggaattgctacaaaacgacggcagcgttaaagagggcgattttaggcgatttatttactacatcgagcgcccaaaacaggtcgacccgcaaaaggcaacgttcgaattaacatccgtgtttgatatggatggattaatgatcccggcccgtctgacgcaaaccgtttgctattgggcgcagcgtgggtggtacaagtctggcaaaggctgcgactacaacgggcagaacggatacttcgacaagttgggaaacagggttgaagacccgtcgcaagatgtttgtggcggcttggtttcttcttgcaggcttcgttttggcaatgaaccgttgagttttggcggttgtgcgacagcaacattgaaaagtggaaggtaatatgttaactccgaaaatcaaaatgcagatcatgcagcacgcgaaagaagtttacccgcatgagtgcgccgggctggtaacgcaaaaatcacgcgtgcaaaaatatcaccgactagacaatgtttctcaagatcctgagaacgaatcaatgccggacgaaacgcagtatgcgatggcatcaatggagggcgagccgatcgccttcgttcactcccacactggcgatggggcaaccacaattccgagcgccactgatttatgcttttgcgatgagtctggcttgtcgtgggttatcgtctccatcccggaaggtgatatgcgaatcattgagccgaaacgccgacctctgattggtcgcccctgggctttgggcgcttacgattgctatggcctaatcatggattttcacaagcgccacggcgtcacactaaaagatcggcgattgccgttcgaatggtggaagccggaatacaaagagaatctttaccaggattactggcaagaggacggattcattgaaaacactggcgagcctgaagttggcgatatgatcatcttccagattcaggcggaaaagtggaatcacgctggtatttacgttggaaacaataacatccttcatcacgcgtttggcaagctgtctcgcagggatatctattctggatggtacgagcagcacaaggttttaatttgcaggcacaaggagcttaaacatggcatcacatacaaagacgattaaactatccggttccctggggcgtcggttcggtgtcttccacaaacttgcggttgattcagtcgctgaatgcatccgggcgctgtcttaccaggttgaggggtttaagcctttcatgcagagcaaggttggtttaaatatgcgcttcggcgttgtcgccgacggaaaaccaatcagcgcgaacgaccttgcgacttttgccgtggcgagggagatcagaatcattccgatcccaaaagccagaaagaacggcgggttgttgcaggtcgttatcggagcggcgattatggttgcggccttctttactggcggcggctcgctggcggctatgggcgctttttcatcggctgcattcatggctggcggctcaatggttttgggtggcgtaatgcagatgatcgcaccgcagatgggcggcaatatgcgggcgagcgaatcgcctgagaataagccatcgtatgcgttcggcgggccgattaacaccacggcggcaggttatccaatccagttgccatacggttacagattggctggcggcgcattgttcggttctggatcttacgcagaagacaacaactaattaagccattcgctttttagcctgggggcgtagcctccgggctttttgtcgtgtacaattgcgagactattaacaggaggctaaacgatgactaatatcaaggcccgtaagggaggctcaagcaagccgcgtaccccggtagaaatgccagataacctgatctcaaaagacaagatcaagttattgctggctgtttctgatggcgaggtcgttaacgacttcagtttgaagcagttgcatttcggcggcgtcccggttcaaaacgaagatggaagttacaactatgaaggcgtgattgctgagtttcgccccggcacgcaaacacaggactacatccagggcttcagcgaatcaagtgctgagttccaggttgctcgtgaagtcactcacaacacgccttatacgcttaccgtatcgaacaaaaatctgtctgctattcgctttcgcctgttatggccgcgcgtgctgactcaaaaagataacggcgatatggtcggatcggttgttgagtacaagatcgagatggcggtagatggcgcaagttatcagacctacctaactggcaaaattgacggaaagaacacgactggcggttacgatcggagcattcgcgttaacctgccgcaaaacttcacgtcgcaggttcttatccgcgtgagccgagtaacgccggatgctgacggggtgaaggttgtcgatgccttccaggttcaatcctacgctgaggtcattgatgcaaaattccgctacccgttaacggccatgctttacgttgagttcgatagcgacctgttccagaaccagatcccaaccatctcactcaaaaagaaatggaaaattattcaggttccgagtaattacgatccgattaatcgcacatactccgggacgtgggacggtgtttttaagtgggcgtggagcaataacccggcatgggtgctttatgacctgatcatgaatcagcgctatggtttagaccagcgtgagttaggaatcccggttgataagtggtcgctgtatgaggtggcgcaatactgtgatgaacttgttcctgataatcgcggcgggatggaaccgcgctatttgatggatgtaattgttcaatcgcaggttgaggcgttccagttggtaagggatatttgttccgcgttccgtggaatgacgttctacaacggggaaagcctttcgattatcgtcgataagccgcgcgatccggtgtacctgtttacggctgataacgtcgttgatggcgttttcgttcggacgttcccaagcgaaaagacgatgtacacgtcgtgcaacgtcatgttcgacgacgaagaaaaccagtacgaacaggatgttgaaccagtattcaaccctgacgcagccatgcggttcggccacaacccgaccagcattacagcgatcggatgtaccagaaggacagaggcgaaccgccgtggtcgctggattctgcaaacgaacctaagcgccacaaccgtttcgttttctactggcctggaaggtatgattccttcttgcggcgatgtgatttacgttgcagatccgcattggcaatcggcctttaacctggtgctatcaggccgcgttatggaagtgtctggcgtgcaggtgttccttgcctaccgctgcgacgcgaaggctggcgacactctgatcctgaatacagacgacggcaagccagtgcgccgcacaatcgccagcgtttcggcggacggtaagaccatcacgctaaatgttgggtataactttgacgttgcgcctgacagcgtattcctgatcgagagcgatcagcttgcagcggaacagtatgtagtaacccggattgaaaagggtagtgatgacgacgaatttactttcgccatcacggctacgcagtacgatccgaacaagtatgacgcgatcgataacggggtaattaccgatggccgaccaacttcggttgtcgaccctgattcaatgggcgcaccgaaagacttaacgattagctctttctcccgcattgttcaggggatgagcgtcgagacgatggttatcggatggtctgccgtgcagtatgcaaaactgtacgaggtgcaatggcgcaaggacggtggtaactggaacaacgttccgcgcactgcgacaacgcaggttgatatcgaaggcatctatgctggcgagtatcaggcccgcgtgaggtgcattagcggtgggaatgtagcgtctccgtggtctgaattggcaaccgccacactgaccgggaaagtcggagcgccaaaaggcccgattaacctgtttgcgtcggacaatgagatcttcggcattcgagttaagtgggctatgccggaaggagcggaagacacggcatacattgagctttaccagtcgcaaagcggaaccgatcaggacgcaagcctgcttactctgattccttacccggcggctgaatactggcactcaattttgcccgctggctacgtgaacttctacaaagccagaagcgtagaccggatcggcaatgtttcagaatggactgattacgctcgcggcatgtcgtcgactgacgttaacatcatcacagatgcgatcctggatgaaatcctggatagcgacgcgatgaaggaactacaggaaaacgcacaggatagcgcggcaaaactcaatgactacgcgaacagcatcattcaaaatgcgctggcgaatgatgcggacgttaggaaaatgacgaaggagaacggtaagcgtaaggcagagatcgcgcataccacggtgctgattgccaacgaatcagaagcgagggcggctgaaattacgcaacttaaagcgcagattgatgaagatatcacgtcgcagattacgatccttaacgaagccctggcgacggaaagcgagacgagagcaacgcagattggtcagttgcaggcagattttgcggctgatattgacggcgtaaaaacaacaatgaacgctggttttacgcaggttaatcaggctattgcaaatgaaagtgacgcgcgtgcaagttccgaggcggcactagatgccaaaatcgggcagaactccgcagcgctaaaccagaaactcgactcgtgggcgaacgttaatggcgtcggttccatgtacacgatgaagttgggcttgaggtacaacggtcaggagtatagctccgggatggccctacagcttacctcaagtggtggaagcgttgtttcgcaggtgctgttcattgctgatagatttgctatcatccgtaatgcggcgtctggcgcgtacacgctaccgtttgttgtgcagaatgaccaagtgttcatgaataacgcgcttattcaggacggttcgattaccaacgcgaagatcggtaacgtcattcagtccaacaactttcaggagaatgttgcaggatggaggcttgataaaaacggcgtatttgtcaactatggctcaacttctggcgaaggttccatcaagcaaacgaaccagaacatcactgttcgagatggtagcgggcgcgttcgttgccagttgggtaggatcactggatcatggtaaaattaatgccgggagaaatcccggcttaaccaaaggaggcagacaatggcttatggttttcaatcatgggatgcgaacgggaaccccaacaactatgggatcgtccctgtttcagttgctggatatattgcattagcgcaaggccagaaaagcggaacgtggtattacaacgtcccgcctgggttgaggcttggtttcttttgggtcgcaaatcaagaccagtacggcacatcgaagaggcgaattaccgttagtggtaatcagatcgttgtttcagatgcgccagatgatgcgctggaatcaggcgtctacccggcgacgcaaggttttattgtcgttcaaattatgagttgatgattatggcagattacggaattttacttaccaatgatagcggcaatgtttgggtttcgcctcaaagcatcccactggcactactatcaaagcagagcatcactcttaggggtggtactaactccgatgaagtaagatcggtaacttacgacacgaatcacccatgcgttccgttcgtggtctttcatggatcttcgccacaaggtgcattcacaaaaatcaagtacagcggaaacacttgcagcgttgttttttcttttggtaagcaaaacgtatatgcggaggtttattttttctccgtgttcccacagccaaatcctggttatgggcttgcaatttgggatgaaaacggcacgctgattttgaccaatgaaaccagaacactttcagacgtacagacctacggcactggttttaatctaaacgtcactaacggcgggaagtgggcggttagtcctgttcagttaggcgcgatcgttggtgttgttcgcgatccctacccaagaccatttcagggcgactattgcgcagcggcattctttaacggctcaagcacgcaacttaccgcatatctaacgcaggcaccaggaggagccgccagcgatctaacctacgtcaatatgaaaaacacctgcatcgctattgattgcgcaagatacgactaaaagaaaggggccatacggcccctttttctaccccttgagatttttgatctcctcttttaattcatcaacttgagcagacagagctttgattgcgcaaattgcatccatcaaaagagcattattgtcaagcacaagtttcttattttcaactacgttaccctcatcatcctgataggatgcgctgctttctttaacgtagcacgaatcgatatctcgcacctgctgtgcaataactcccctacgctcgcgtttcttaacatcatccttataggtgaacttgaccagattcattgctttgatgttttcgagtgactgcaaaccatcataagcaacaacattgtctttgtagttaatgtcagatagaccagcaaaaacaacgttgccataagcagtgcttgcaatattaccatctgatttaaactgccaatactgcgtattaccgccagttccccatttgctgacctcaataacggcacgatgttcataacccctatgttcctcaagccacatagcgcaacgcgcaccgttaccattaatgttgaaccgtgagataaatgatggagatttaaggatatcaccattattcccatttggatcgctagttggccacgctacaaaagcatcattaacggtactcctcacagtcccatatgacacaacacttccgcgaagatcggcagccccgccaactcgcaacgtgctcgacattgtaacagcgccgcgaagatcggcagccccgtcagcacgcaacgtgcttgacattgtaacagcattgctaaagtttgcattcaacccggtaacagcaaagttcgatgcatcaaaaacaacctgcttcgcgctgttcatatctccattagggcggaagtacattccttgaccattttcagggattgagtacacgatcgcattgctgttatttgccctaatagtgcaaccgttcagggtcagcgtggcgtttcctccaggaacgctaattgcctgcggctggctgaacgtgttagctacgttggtgcgcgggatcgtattatcattagccatcaaatagtcagacggtgaattatatacaattccagaaggctccgtgtcaatccaggtataaccagtgcgatcaatgattggccccgtaatcgaccctttgttagcctgtacgtttacatgattcaaccacagttcaggaacccatccgccgggagcatgaatataaacatcaaacgaggagtctgtgtttttcaccaccccaagattaatgcgtctggtgtcgtttggtctggcagcaatcagggtgcgctgagtaaaccaagtgtcaatattattactggttagcgtatcgggaagaccgcggccagaaatcgaaaagatatcaaccgggagatttgcagtgccataaccagtacctccgccaatgatgaactgagcaaatgcgtagccatcaccagcgttcttgacgttggcgatcttcatccacttctccccagcgaaagtgccagtaattttatccggcacctggacgccagccacaaggtcgacaacctgatcacgaagattttgcgtctgccccttcgcagtttgcgcgtcgttcttcgccgagttggccgcagtttctgacgcttttgcattggtctccgaggttttggctgcggtttctgatgcctttgcattggtctccgagtttttggccgcagtttctgacgctttggcgttggtctctgaggtcttcgctgcggtttctgatgcctttgcgttagtctccgacgtcttcgcagcattcttggatgcagcagcattggtctctgaagtctttgcagcggtttctgatgcctttgcattggtctccgaggttttggccttattctccgaagatttagcgttcgtctctgaggtcttcgctgcggtttctgacgctttggcgttggtctctgaagtttttgcagcgctttcagacgcagccgcagccgtagcgcttgcgcccgcagcttcggaatctgccctcacctgatcggcaagactttgcagagcttcgaaatcgaagttcttaaagaagtcgacagcatccgcaatttgagtttcctgtgactggtagtagcgcagagtttccgcaacatcttgcgccagtccgtcaacggtcagcgagtcacttaacaggatcgcgtaatcgctagacgctacgacagcgccttttgtggtgatggctttaatttcagtatcgctaaccaccttgtttacgacggccatttgaattggtgacgacaaaaacataatcgtcgcaccagggcgaatcagcgaaagcgatgattgccattttgtgccagtcccggtaacggttccgtctgcggccatagccgctttgccttctctgtatagtgccatgtttttaagcctcattggttgattgagtaacgcagataatagcatcaatgaaccgataaaaaaaggagcctttcggctcctttagttgtcaaattagaacgggatatcatcatcgaaatccatccccgcattcccgccgctgttttgcggcttaggcgcttgttgcggcttgggttgttgaggctggccccacccggattgctgattgccgccgccgctttgcgaaggatcgcgctggctgaattcgagttgcggcataatcatttcgttgtggctgtaaattgtgccgttgtgctcgcggttaacgatctgaagcgtccggcaggttacgctgatcaccttatccatttgcagcgcttcgtcgtaccacttaatcatgttttcttttgcaaagaaaactgcgcggtagttcgtgtaaattgtttcgtcctcgccatcacgattgcggatcttcatccgctccgacaggtctacggcgtacattttccacggcccgttattgttgctgccctctttgacataaggcgcttttcggattacccctgttacaacatgcattgtcattcctatggggcggcttcccgcccgttaaattagttgaaagatgaaatatcttgcgcttctggttcaggttttgattctaccttttccggctcgcgcttcgcaacctcttgcggtttaccggggttaaatccgtttgccggggtgactttcagttctgcctggcgtttggtgatatcgtcttccgtcattttccactccgccggggttaacgtttgtttcgccagcttatagatctcacgaagcgattcgagatcttcgcacgcgtcaatgcgttttttgaagtctttcggtgtcattttcgtaatttctgcatcatcatccgcctgcttgatacctagcgctgcggccagcgcataacggcgggcgtaagatgttgttgagccgtatgcttgttcgacggttttactgatcggcatattgtactgaaacgccatgaactcgccgctttcatgcaaaaacatagtttcgaggtgcatcaccttttcggtgctcgtatccatcatggattgaatgaccataattttgttcttctccagcgccggggaaatagcgtcgaggatatccccaagattcgcataggtgttcccaagatggttgttcttaccgcttttctttgcggccacgaagccagattttgccttgattaatgcggctgcgatggtggtaaatttttcagatgtacgcatgataaagtttccttttcctaattggtaatgcgcactatatcacaagtgcgcaccagtgtttagctatttgtgccgtatacgtccgggaacatgtatttcacaaactgaggagtcggcaaaacaacttccgccgcgtttgactcatatgatggccatgaatcgtgcttcacgcattcagcatactgatgaatcacgctttgatactgtttgcgaccgatctcgatctgctggctggtcagggtgaacgccagcggagcaaacggtgattttttctcctgcgttagcagtctgacaactaccgggcgtttttcgttgtaagtcttcacgaacagatcgcgctgcaatgccatcttgagatagtagcccaagttgaaggcgagtcgcccgaaatcgtcaggcttggaagattgcgtggttttgtagtcggtaatcaccacgacctcgaaaacctcatccgggttgaacccccactccttgatgagttcgggatcggaaacaacgtcaacatgatcgagtcgaaccttaaccttgacgccgaagatctcaccgaagattgacaattcacgctgtgctgtaggcgattcgatacatgcggcgtgtcgcgggttagccagcatcacgctgcgcatttgaacaacggcatcgaaatcaacatccttaaccagcttgcgcccggagtttatcgcggcgctttcgtcgcacagttcaatagcccaccaaacatttacgtcaatcccggcgcgatatgccatttccagaagttccgggtaatccttgttggacgtcccaatcaggccacacgctttcagcttcgcagacagtgccgacttcgacgtaatcagatctttaacctcgcccggagaagtcgcccgcaggtactcgccattaaactttgccgtctcaagcatacaggtatgcgaacaggttccgaacgccagcgcggctgcttcctcacgcactttgaatttccagtgcgccggggatgttgcgtaaatctcgccgaggcttgagccgctaacgtattccgcgcaccaggagttaggatcgtggtaatcatcgttggataattccgcgttggtgtatgccttaaaaattgcttcagccattggtatcactccatttgtggtttcgttgcgttaagtatacgcatgacgattccaggcgcaagtcaaaaagtgctatccgcagttggttaaaaaacgagcgaaatttacgtaagatttagtaagatgcatcttacgtgatttttcctatatatttcatttagttaatgcaaatcggtaagatggtaatatccctataggtaaatatccatgaaaaatatggcgcgaaatccagcgaaaaaagacacgcaccccggagaaatcttaccaagattgatagatacagatagagtaataataataatattgttatttatcatatacttactatctatatattgcggttaattggttaaattttgcgcgaaatttacgtaagattcatcttactaaatcttacctaaagtggttcgaccagctgcaagccactgaatttcaggcataaaaaaaggtaagactgatttgctcaatcttacctaaattctggtcaacatttaatcatagaagcgacgatgccctgtacaacttgcgttcaaatccgagcttaaagttgtcaccgttcggaacgataactttaagatcccgatcgtcagcagccgccagcatatcccgatctccacgacggcaaactacccgcatttctcgcttaccttctccgccattgcctttatacctgtacgccacgatctcgacgtttgaaggtatgatgcaggcccaaacgtcgcacttgaacgaactggcaatattaaagtgcatcgcctcaatccaggatcgagcaaggtaaatcggcccgttaccgtcgtcgctctgattggtcactatcaccgatccgaatgtcagatcgccagccaacatcttctcccgaccctcctcatcaatgaacagcatgttgcaatactcatcatccggcccatcctcatgcactagttgcattggtagcgcgtgaattagctcctgtctgcagttctcgtgagtttttacgccaaccagatatgatttgatatgctcattttcaatgccctcatagagcgttacaggcgtgctatcgacggcctccgttctgtttaaaactgccatcactctttcatgatctgccatctttccgtagtcatacccgttatcacgagctacctgcttgtttctcttgactacgtattcttgcggaacctttccgagatagcgcccaagaatgttgatgcactcgctatacggctggccgcttaacttcattaaccagccgatccccttatcggcaccgcaaccgccacagtatgcgccgccatcacctcgcgtttccagcttgtcagtccagcggaatcggtctttgccgccgcagttcgggcagtcctggtgcttgccgttgaagtatcgagagtggatgccgcaaatgttctgcaacgcctcgcgccacatgccagccatgtacggcaaaacctctttttcatcgtaaaaatccacgtcgtaacccccaaataaaaaacgcctacacgagaatgataacccggcaggcgtttagtgtttagtcaaattgtgctatcggactacgcggagcatttcgcggcggtcgcatcggcgcgtcactggcttgccgttgctgtcaaatcttaaatcaggtcggcagaatgaggcgcgaaaacctttgcaattgttccgtcggtagctcttatgtactagataagcgccatcggctgagatcataccgcgcttacgccactgctgaacaacctggatactaactcccaactcttttgccgttccagcgataccaccgaaggcatcaataaccagctccatccgcgcagtcaacccagctcgaacctcatccttcagcacgtagtaaccagtcggtcgcttgcgtttcttcttatctttcccgcgcgacgttccgttgttgccgttcaaggttcgcttatcaaccattgccatttgctccataattcaaccctcatagcattttttgttaaacctgataaaatgttccatgtattatacacgcaactatgcgaatgacaaattaggattgacaatggcaagcacagaagaagacgtagcatattttaagcgactatttcgttatgaaggcggaacactgattcgcaaagttacaaccagtagtcgtgcattcgctggagactccgtagggtgcgagaacaacgttgggtatttacaggtaagcgtaaaaagcaaacccctatacgttcaccgaatcatttgggaaatgcataatgggcctatcccagaaggaatggagatagatcacatcaaccaggtcagaacagataacagaatcgaaaacctgcgactggtaagccaccaagtaaaccttaaaaaccaatcgatgaacagtggcaatactagcgggcacgctggcgtaagctggtttaagcgaggcggtaagtggagggcaacaataaaggttggcggaaggcaaatacacattggttacttcgcgtcgtttgagtcggcagttgccgcacgaaaagcagcagaaaaacaatatggttttcatgataaccacggagcagagaaaaagaaatgagcttatcgattgagcaacaaatagatctatacgcagacaaaatcccggcaatccaaaagagatttaccgttggaaatatcgttccgtatccatatcaggctgtggcttatattgagacagccaaaagaatagcaaactacaccgcaccgttttacattaaggcttcggtttccgccgggaaaaccatcatgatcgccatgctcgcagcgcagtgcaaggcaatgaacttacccatgatggttcttgctcgccaggccgagatcgtgaagcaggattccgaggagatcagtaacctcgacgttccaaactccgtttattgtgccgggttaggcacgaaggcggcatacttcccgatcgtcgtcggatctgaagggacggtggttaatggcctgtttaaaatgctgggcgactacgtgccttcagttctggctattgacgaatgccaccaggttgactggcaagatctggcggaagcgatcgccaacaatgaatcgttcgagtacatgagccgaccgaaggataagccgtatcgcgtgaacggggaactggtcgatgccgaccacccatacgacgaaaaattcgacgacgtagaattcggcggcggtcgcacgcagtacactatcgtcatttgtgagttaatgcggaggtgccttgagaagacagggcgagaacttcgcatcgttggctatactggttcggagtttcgcggcgtcattccgattttacaggaagacaagagccagcctggtttttggcgcgagcagatcaccgacattaacacaaactatcttgtcgagttcggatcggtggttccgacaatttttggtgatactgaatccgaagggttagggtatgacctatcagaattccacggttccagtcaggacggtacgcaggattttagcgcggaagaattgcgcaagatggaaaagaaaatccatgaatccggcgaaatgacgaagctgattatgcaaaaggtcgtggagcgtgcgaaaacccgaaacggagttctgataacttgcgctggacagcggcattgcaaggaggcggcgagctatctaccgccggacgcaacatacgcgatcatcaccgaaaagacgaactcaaagaaacgcggcgaaattttggataaggcgaatcgcggtgagatcaaatacatcttccaggtgatggccctaaccactggcgttaacgttccattttgggatttttctgtgatattgcgcaagatcgggtcgcttacgttgcttattcagcttttggggcgcggaatgcgacttctgaaggactggcaaaaacagccgccttactcgtgggtgaaagaagatcaccttgtctgggattttgccggaacaatggatgacctgggccagttgtatttcgatccgatcttggagcaggcgcaataccaaagacgcaagagcagcaagaacggcccgaaaatttgcccggtatgcaagggggaaaatagcgagtacgcccgcagatgcattcacaaagacagtaacggcaatcggtgcgaatacttctggatctcgcagaggtgcgaagaccagaaagacccgcgaacagggaagattaaaatcaaggggtgttacgctgaaaatgatattgttgcccgccaatgcagatgctgcggcgttcagcttaaagaccccaatgacaatctcaccgggaagcactatacgcagaatgactggtatgatgttgtctggttcgatatcggcttgactcgcaatcagtccgggatcatcttcaattacgtgttactgaaccatgacggcgagcgattcaccgcaagggaaaagttcttcccggaatcagagaatcagatttgcggcaagctgtggcggcaaaaggcagtcttccagcacgttagcgacgcggtaatgcgtggcaagttgggcggaatgaaaaacgcccgcaagatcctggagtatgcggaatacttccgcgcgccgaagcgcgtaacgcatcgcatcaacggcaagaaggaggacattatttcccgcaaagactttggaggcgaggagtgattacagacaaaggggattacctcgaatattacggcgggcctgtaaaggcttgcccacttgaaaaaatcgaccagatgaacagcgtttcgtggctgcgttacgaataccccgattatctgttctggcatacggttaacgagggtagcaagcacaaggcgagcgccgttgcagatcatcaaatgggattgcttaaaggcgttagcgacttcgttatcctgattggtttcggtggcaaatacccgttcgcagccattgagctaaagcgccagggtaaggcgcaggcgtcgccagtgagcaaggagcaaagggaattccttgctgccgcccggcgtcgcggcggattcgccgccgtggcctatggcttcgagcaattcaagattgctttctgcgatgccataaaatagcactttttgttaaaaccgcccggcgaaagccgggtatcatttccacatcgaaacgaagaatggagtgttgaaaatgaaaaagatgctggctttagttgttctgtctcttggtcttattggttgcagcgaaaaaccgaaaacatatgattgcggtggtgaagcgtttgaggtaactagcaactatatgaaagttgtcaagggtgaaaactctggcgttataattgatggcgctggcgaaaatcaatataaactgcttactccttttgggtacgctcattatgcagtcaacaaaaacactattgatgttagcgtgggcgcttttcacaataccttaacctgcgaggttaaataataatggcaaaagatatcgcagacaaagacactcatgacgcattcatcacgtttgagcaattggagcgcgaaacgtttattggcaacgcccttgccactggcggacactatcaagccgtcaggccagataagttctatcaggtaactggcaaccgatacgcaggtagtaaaacgccggatattgtgcgcgacaagtgggcgacagatcgaagtctgatcgcatacatggaagagcgttacggcaattacgatcttgatgtcgccgcagaccgaagcaacgcagtttgcccgaagttctacgacgaaaaaacggattgccttaaacgctggtgggggaaaaacaagcacatttggctgaatcctccttactcgtttccagatccgtttattctcaaggccattgagcaaatggagcacgacaaccagatcgacattctgctacccggcgacaattctactgcctggttccgtgacgcgcagaagatggccgccgaaattatctggattgttgccgatgttgaagaggatgattacgggaacaagttaagtcgatccggtcgcctcgccttcatcaatggattaagcgggaatccagtcgacaacaacaataagggaagtgttattttcatcatgcgcaagctcaagccgggagaggagcaaaagacactttacattccggtaagcgagatttgcccgtcattagctaaaaagcgtatgcgcaaacgtgggatctgaaaaatggaacagacagagtctttcgccgagtatcttcggatcgttgttgaacttctggacaagcacggcttcattgggacggatgaggaaaagttagcctttgctgacaccatcgacggaacctacatggagttcatggacaacggaaccccggtcgctgactggccagaaattcttgaacgagaattgattgagtttaaatcacatgaaggcgcggagtatttcgcaaaacagcactaattgctaaacaatacccgccgcgtgcgggtattattactccaccaaccaatcaggagcaaacgccatgaaaaccaaaaccattgcagacaccatcaagatcgtaccagtaaaagcgcaagtggtatcgcgtcaactggttaacctgtctcgcctgtgcatggccgactacatggcgaacccttcagataattgccttgatggtgtagtcggtgagatttattttcgcgctggttatggactggaaagcgtggccatgtatgagcaaatggccgaaggtttttgcatttacggtgacgaatgatgattgtcgagactggtcgcgctgccgtatggcagcacgcaaaagaagcgggaataagtgatgatatcgtgaagatctcaaagtatttcgatatcaaagatatatcaattatctttggtgggaagctcacctatctaaacgagcgcccggtgaagcgcacgcgaatagcagtggcaacgcgtgcggaggccgacgcgctgaagatgttcatacatgagtcgaaacagcagaaaaaatattacaagtagcgggggcgtgaagaatgcgatatattgcgatcctatttacggcgatcctgttcacgatcgcaatcatgaactgcgcaattcaattaggataaattatgttaccgaaaatcacagacgaagaattcttagccgcccgcgaggaaggtaagacctaccgcgagatcgcggaagagttcggcatgaacattcgaagcgttgaacgtcgtggcgttcgcctggcacgacaaggacacctacacggaaacgcccacgtttcgaagcatatcccggacggcttcggcgtcaaaggcacgtcgacgatgattcgcgcggacggctccgaggtcgttcggtgggtcaagtcggaagtagacagagatcgcatggtcgcgcttatggaggcggcgcaggcggctttctgcgaagaccttccgcgagctgaaccgcaaccgctggatgagtcgaagttctacattgaagatcagcttgccctgtacccaatcttcgacctgcatattggggctatggcgcataagcatgaatgcggcgagaactatgataccagcacggcagagaaggttctaaaccgcttctttgattattccgtgtcggtggctccgcaatccaaaaaggctgttttgctggttggcggtgacttccttcacagcgacggcctggacgcagtaaccccggcaagtggtcacgttctcgatcaggacagccgatacgcaaaacttgtttatgttgccatccgctcgctgcgtcgcgccgtgtcgctactgcttaacaatcatgccgaagttgaagtgcaggtaatcgaaggcaaccacgaccaggccgggatgatttggctacgcgcagcgctggcggcgttctatgagaatgaaccgcgcgtttttgttgatgttagccctgcgatcctgcatcgcaccttgtggggcaaaaccatgctgggctacacgcatggccacacgatgaagaagcctgaaacgcgccttgctgcgatggctaccgacttccgcaaggagttcggccagtgcgactacatttacacgcattccggccactggcatcaccagactgtaacggaacactcgttaggtattgacgaggtgcatggccagttaggggccaaagacgcttacgccgctcgcggtggttggcgctcctatcgccaggcggcggttattctgtacagcaaagaatatggcgaagtaggccgctttatctaccgcccgaacatgtaaccacaacggccccgcgaggggccaacaaggaaaaccgatgaatagaaatatctgcattttcgatctcgatggcacgttgtccaatggcaaccaccgcttgcacctgctgccgaaaaaggatctccaccttacagaaagttggagtgaatttaatggtgcatcaattggcgacagcccaatccaaagcacaattgatgtagcgaatgcgcttcatcgctccgggatgattgtcgttatcctgaccgggcgatccgatgaggtgaagaccgaaacaatgatttggcttgaccgttacggggtgaaatatgacaggctcatcatgcgtcgcgccagcgacaaccgtaaagacacggtaatcaaggaggaggagttacgcaaaatcggaattgatcgcattgttgcggcatgggatgattcacccaatgttattgcgcacttgcgcggcctgggtattacgacttaccaggtctgcgactacggagacaatcttcaagatcatttaaaatcgcacggagtagacaaatgaaaaatgtaattattctcaacggagcacccggaatcggaaaagataccatcgcggaaattatctcgcggaagtgggaatacaagaaccttagcttcaaacagcctatgtttgccatcgcgcgtgctgtgcttggatctactgattttgcacgctttaccgccagataccacgaccgcaagcacaaagaagtgaaatgcgattttttgggcgaccgttctccgcgtgaattcatgattcacattagcgaaaacttcgtcaagccgaccctgggcaaaaatcagttcggcaagttgctttgcgattcagcgctaacttcgccgtttaactgcatcgtcagcgacggcggttttgatgaggaggtcgagcacgtcgcagcgcatgaggcgcttaacgtatttgtcgtccgccttcatcgtgacggcatgacctttgagggtgatagccgcaaacacattcgacgacccgatctgatttgtgacacgtatcacgaacttgattttgatatgaccactggcgagcctgaagacgacgcgcaaaaaatccttgatatggtttcagatgttgcattaaaattataaagttaatgcctttattatcaccaccttaacgattgggaaccttgacgggttcccttttttttgttcttaattttgccaaatgaatatatcatcaccttaccatttaactaacagaggttgcatatcatgcgggaattcatcaacgcggcaaccaatagcagcggcggtgttgcccttgcgggatctgcatccgggcaattaatcattgctgccattggtttatttttcatgatcttatttggctcaatcggcacgtggctgaagtggaaagactcaaaagccatccgggaggcgattgattctggcgacattaaagaggcattgaggatcaggagcaaataaaatgggaatgaaaacgcggcttactttcgcggcggcggtggcgatcgcggtcgcgttcctccccgaagtggaggacactaaatacacggtttatacggatatcgctggcgtaccaactgtatgcgaaggaatcacaggcccggacgttatcaaggggaaaacctatacccggtcagagtgcgacgcgcttttaaccaagcatatccaggtagcaaagcgaaccgttgacagcaaaatcaaagtagatgttcctgacaccttcagggcgtcgatgtacagcttcacgttcaacgctggcggcggcgcatattctggcagcaccatgctgaaattaacgaaccagggccgattgcgcgaggcgtgcgagcagctatatcgctggacgtactaccgcaacccgaaaacgggtaagatggagaagtcaaaaggcttgcataatcgccgggttcaggaatatcaactatgcattaaggatctaaaatgattaaggtaattggtgtggctcttacggttgttcttctgtctggttgcgcttccagtgtcccgatcctttccgatctggtgggcagcaagccggatatgacggcgcaagtaggcgcggagaacgttaaacaggcggttggcgtgacgaacaaaacggacacgtcaagcaagcaggagactacgttcaaagagtcggcggtaggaaaggttgacacgtcgaacaaaaaatccgtaacgacctccagcattcacgccaaccagatcacggcggacaagatcgagatccgaaacgatgaaagcggaagcctgactccgtggctgattggtggtgttggggttgtaatgctggcgataggtgcgttcggtctttggcgggaacgaaaaaacaaaggggcgtaatgcccctttttctatatgtaccgcttgacgtgcaatagcgctactccgtcttcatcgttaagaccatgttcaaccgtgttggttgcagccattccttgatagagcaagatgagcgcggcacgcaagtaattttctggtgtgatctgtttcacacaaacaagcctgtgaacttccgttatcagatcttccacctggtttcccgaaaagctgttcatcactgagttggtcaaggtgcatcatctcccatatgtatcggttatccatcccttcgaacgaccggaaatcaaaacctatttccctgttatccggccccgtacaccacacagagccgttttttccgtcaaggtatccattcgtatagcttcgcgctaaaaactccttagagaccattgaggcgaacatacgttgcgatacgttggcggcttttgccagtcgaggcgcttcgcggtgcgtatagacgaacttcgcaaaatcctgccgggtgaactcccggcgagattcgcagaacttgtaaatgtcaagaataaacatcaattacctcatgaacgacgggttgataaagacttcggaatccatcacgcagataaagcctaattcctccatcttcggcaataagcgttccttaatctttttgctcaccccggcctggcctttgaagatcttcaggttgcggcaggcgttataaatgccctggacggtcataacaccttttgcctgtttgcagcgactggcgataacgtcatacatcgctttaatttccgctccctcaccagcaaagccggaagagtcagccgacgacaaatacgttttgctcaattcatggaacataatgatcgcttcgtcaatggtcgccgtgtcgatcttcttcgagcgcttcccgccgggttgccagttccggatcgtgtgaatcacggacgccagacgcataacctgcttatcaaacttacccatcgcgccgcgaagcattgtatgcgaatacttgccgccgtcgcctaactccggttctaactcctggcgggccttgttcagcctacgcattgccgcgtcagtaacctgcaacttaatgttcgactcgctcataatgtcatgaatcagccggaagtaatccgccttcagtgactggtcgatcggctcataggtcgaattcccgttttcgtcgatgaacacgcgttcacccaaacgggtttgctcacgaaccaaaaggaagcgttcagataccccgatcccgcgagagccggcctgcataatggcgtcgatggtttcatcctgggcaattacgcaaatgcagcccaaagcctcgaatgacatattgttgctaacgtcggcacgagcgatcgatacgtggcctttatcccatgctttgagcaccagttcgctgttcgtcttcttaccgccatcgtttccatacgtgatccctaaaaggctgttaaccgccgtcgcctcatcggaaataacggcaaagtttccctgtcggttgttaatcttcgccagaccttccggggtggtatcagataccgggaaagttaggtcacacaatttttctaacttctcctcaagttcgtcacggtcttcaaaaagtttcaccatatcagattgcgataactccccttttagcgcctgcttgttggcggacagcttcgccatgattttcttacgctctttctttcgagactcgttaatgcgttcgacttcggcgacaataggatcgatggcaagcgagttaatggcagacttaccagcggaaggcggctgcgacgtgataacgtaaagcgttgtcggttgctcgctgccgtggtactcgacccaaaagcggcccatcatcgcggcggatacggttccgagaaagtgcatgtaagcggatgattccgggaactgaacagaacgcgctgcatttagcgccagcttgccgacaacatcataatcattggcgatcgagattgttggatacttatccgcgtttacgtcgatatctttgggctttggccagaatgaaacggagtcacgatacccgttcgcacgaatcgcaacgcgcaggggactgatcccctccctttctgcgatggcgataatatcttgcggtgatacgcggtcatttaaaaacatgcccttgctcctgattggttaatcgttcggctaatcatatgccgtattaaatccgagatccagtgataatctaaacacgcttgaaaaacgcgcttggattatcggggcgcatggccccgaacccgtcacaggtatttagcttcgaaagtcgttccgtccgatacactgaagccaacttcctcgcggtacagcgtccagcggcatccatcacgatcgaagatgtatccggcaaccgcgccgagcgcacgaccgctttctacctggtagcgcttgccgacgctgaaggattttttcatcgggttgctatggtcaaggccgacgcattttagcgttttggtttttagttcgatgaacgtcgcaatcacctggccaccagcgccagcaataaacaactcgccgctaacgcctaccgacaaaataacgcgcttcttcttcagttcgacgctgtcatataccatcattgacacattgccttcatcgtcgacgcgggcgggataaaggttattttcgtgtatattaatagcgcggcttgacgtgcatttaatcttgattgacttcgccatttattttctttctccgatctcgatgtacaggtttaccaaatccagaaagtcagccttgcttttgcaacccaacttaaagccaacgtgcgactcaattttattttgcatcgcagccagtgttgcgccgccattattcatcctgagaacttcgcggcatacttcggcgagcttttgagatatcatttcttcaccacctttatttccatgccttcgcaagcgctcttgatatcattaatcagacgattaagccttaaatcagtcattacatggtgatgacgtatatcaataattccagcaacgactaacagcatgacggcaaagataaaaccaccaggcccggacatacacaaaacagttaacatcatcaagataataaatttcatttccgttttactccgttgcgtttcgatggggtgattctacccgactttcgccgggtagttttagaaattcgtgctattctcgataattcgcctggaacacggcgcgggcaaaacctcgcggagtaatggaacgcagcattttagtcctttctgaccttccacccaaaaacttccaggcccaaaagaaattcacgccttctactccatccggcggcgtgagccgtttcggttcgacaaaaccgtttccgtgccatatgcacgttttcttcgtgtaattgtcacagtggggcattttgggatgccacacaggctcgttcggagaaacatagccaccgaagtcgcgcggatggaaataaaaatccggctttcgccatagtgacgataatttcccgaccgggttttcgaccatccaggggcaaccatacttattgcctaattgctcgaccatcttcgcatcccctgctgcggataatacgtcattatcttcccttacgtgcttgattccgctatgcgctaacagcgtgcatggcgggaaagcgaaaatgaagtcaggatctggaatgccgagaatcgatcgcttaacgtcaaaatccttgtcaatccaaatgttaacatactggatatttgggtgaaccattcgaatgctatattctccgtggtcgccggagtcggcgttgaaacagtacaccttgcatcccttgatggcccacggcaggcccatgatgccggagccgtcgaacatgcagtaaataaccttttctttcatgctttccacgcctcaatgaacattctgttcgattccagcgtcagcgtgacgccagccagggaggactgaatgagacgaccgcccggaaccgtcccgatgatgtagcggcctttcgacttcgtgatcgtgatctgagtgaagccggaggcgcggttcatgcggagaacgacgcggccatgagcgttcaggacggcgagaatggaatcagtcttcggatggttcattgtgtagctccttcgtttgttggtatggggacagtatgccactatcccgctgtgttgttttagcaaaacgtgctattccggaacgcaggtcgcgtaatcctggctgatgtagatcgtgcgctgaacgcgaggttcgagatcaccgagttcctggatggtaacatcgttgcttcctacccggcacggaaccgatccgaaaataaactcgccagtctgcttgtcgttgatttgccatacattaccgccttcctttttgacaaccaggaaaggcgcactgtctgcactgaactcttccgggccacgaccgtagtaatgcgtgatcgcagctttggccgcagcgctgaaggcatcggtaacgtcattggtcgccttgtctcggatggccttgatacgttcttcaggcgatccgatgatgtaggaaaagctgttcgaaatggtaactgttcgcattatattttaacctcgttttggtggatgaagtcggcgacgtaatggcattcgatcgggttctcgatacccgccagcacctcgcaagacccgttattcagtagctggcaatgctggcactccgcaccgccaacactggcaatgacaatggcgatcccgttgcatgaaccgccgaacattcgatgagggaagtggtaagcatcgcaggtgcaaaccacctccccggcccgccgtttcctcatacctggcccttctcgatgcagaaaacccaatcacgagcgtcaaccgcaaagcgtgcaacgccgtcgagcaccacgaagacagtaaacccgttgacgccgcgacccttctcgatatcggtcacggtgcggaacagatcgcttgcgccatattgaattttatccccgacgactacatccgcaaatgctttcatggttaatctcctgactggtttcgatgggttaactataccaggcctcgcggcccggcgtttagcaattcgtgcttatttcactgctttcttcgctgccttgtacgcctctttgaaagccggaacatcttcgaccggaatccagaagccggagccatagccatcgtcatagcaagggcattggtcgcagtagtcgccccaggttttctcttctccgccgacagagaatccagtgggcattttgcataacgcttcctcaaccgcttcgatcttgtcggcgtcgctatccatgataacgaagttccacttgccgttatactcgctgcccaggttgattgattcgcgttgaagtttcatagctttagcccctttggctcaattcgtttcgttgaagtcatcatagcaaagccgatcggatggattttaacaaaaaatgctattcctgcgattgctgattattccaccgattcggaatagtggaatagatggtgattgcacctgattccctggtgattagttttgacgaatcatgattgcttttgattgtttcattttgtgcaacgattttgtgagtgtttcaggatttgcaacgaattgcataaatgtatgcaccatgcacgcaatttgccgatcgaagccagcaaaagcgccaggtgtttttcgccaacatttacgtcgtgtggaaatgtgggggaggaataatcttacctaaaaattgcgcaaaaagtgaccaacataagcctataatagatatataagtatatgataaataataatattattattattactctttatctatatatatgtttggtaagatttcttcggggaggttatggattcctcttgcgcaagccatagtttttagatgttccgccgcgaaaaaatgtatatagggatatataggggatgacagcaaatcttaccaaacacgcttaaacccttttacggcaaggcttgcgggtggtaagatgacattcccacacaagcaaaaacgacgtaaatgttggagaaaaacacatgcaatataaaggctatgagttcgaagaagtcgacgtgtccgagtggatgcagtacgacgcagataagcaggcagcttaccatgaatggctgcaatccatcacgtttggcggctcaccaggggtagacgatcggccagttgctgaaaagtcacccgccgcattcactggtaatcgttcgtccgagatccggcgcatgttcctggatggcgggcgacgtatccagatgacggcggaggagttcgcggataagttcggcgttcatccggtcgacaaccatttccgcaggccgttgctgaaactcctggagccgggagaagtgttgcgggtgagcctgggggcggggttgatctccgtctttaccgagttcgacgcaatgactggctcaaacatggaggctgaggcatacaggcggcagggcgctatctccgagagggaaaggattaagggtttagtggccgctcttgctgtagactttgccggacatgccctggccgggatttacaaggcgaacttgttcgcggctatcgatcttggattgaccgccagcgatatcagccaggaagcggccaccacgcaatagcactttttgttaaaacccggtcagagcgatcgggtattgtctttccatcgacaacgaaccgaggaaaacgaaatggtcactcttatcacatgggaacacgaaaacagcgagccagtggtgcgcgaattcgagaccgtagcggcatgttacaacctggcggcaaatggtggcttttacaaggcgcagatcgttaacgagttcggggttgttgattatgaattttaaggcgagcgacgtaaaacctggcgtggtctacggatcgcgcctcaataaccgcctttggcggtgggacggcgaaactatgtggactaaaggcgagggcgatgttatctggcatgaatgcggctggccataccccaccatgagccgcctcgatatcgcttattatctttcggttggcgatatgcacgagatggaagatagcactttttgctaaaacactgctgtcgagatccggtattatttattcatcgacaacaaagaggagatgaaaatgagcaagaagaatccatattcaaccagcaactaccataacgaacacgtcatgcgctggcactggcagaaactcaaagaacgccaccttgcacgccatggcaaataatcacaatagcgccgcttcggtggcgctgtatcccaaccataaaaacggcttacaccaggaggattggccatgccacgattttcagcaacaacaaaacttcgcaccttcgccgggatgccgatcccatactcatcaaccaaagccgtccagggcagcgagcacggcgtatacttccactggtgcggcaagtggcgcttcaccgtcattcgcggcttttacgtgacctgcgaccacgtggatattaccgactattccggcggaaaccaggttcatgagttcaataggcacgaatagcactttttgctaaaactcgatcggggcaatgcgttattattaccccatcgaaacagaggagcaaaaaacatgattggcaaccacaacaacgaactgaacgcagcagcccaccgtcgcgccgtcgagcagaacttcaacgcgcttaaagtagcctgcgatgagatgaaagcaatgcttgaactgccgtcatgggatccccaactcgaagactattacgacggcctccgcgtcaagcgtgacgatatcatcaaccgcctgcgcctggctggaatgtttctgtaaggagaacgcaatgattcacgaaattaagtctggaaaacaagtagtggccaccatcacgcagcgccacgttgtagcatttcagtttaacatccccggcaccaacgatatgcagtctcttgacgtgccagtttgggctaacacgatcgccattgatgccgacggctcgatttgggcctacgagtcgaccgccgaggatgtttgcatcccggactactcgcgcaaagcctgggtggattgtgggccttccgaaaacaagatgcggtcagtaggggagatggatcgcttccatgattgggcagaatcgaagattgaccttcgcggcctgaaatagcacgcattgctaaacgcccggtcaagggatcgggcataatcatcacgaagtctattaacaaaccgattatgcaaggagacagaagaatgcaacaatttgaatctcgcggcaagacatacaacctgccggacactgctacccatgccgcccctggtgcgtgcggcggcctgtattttaaggatggcgatagttggtttttcatgggggatgtggttgggggtgtaccgacgaagacaggcagcttactcgtgggcttctacgatcacgacttggtggagttgaagccaaagcgcgtaccgttcgctttctggaaaaaaatcaaaggggcgatctttaaatgaatcaattcgaattcctggcgcgtgcgcaccgtgcgcttgcaatgtacgccttcagcaagaacatgaagattatcagtgttgaggttgagttcaacaatatcagcatttccggctacgttggcgactcataccacgtgacgaaattcagcttcccatcgctggcttgcctggagcgtgaggcattcggtttctgaatagcactttttgctaaatgcccggtcagcagatcgggcataatggccacacaccaaacaacggagattcaccatgattcgcactaccagaccactacccaataacctttacgccacgattggggttcgcgcggtgagacttattcacatcaacgaagttggcaacgtggctattttgtggtttaagcgccactcaagcggtgttggcctgagcattcaaagattcgggcgctttaacggcaactcccaaacccattctcattgggttgatggctcatactgctggacgcacgttaagcacgtcgagaacttcgacgccaaatcactgagcgacgacgacgcctggaagatggtaacagacctcttcggttatgatgcctgcatggaggtagttggatgatacgtttatcagacttcgatcgccactgcttaaccgggcaatttggcgaaaagccagtaatgtgcaagatctcgaaggtaaaaggcgaccccgtcgagcaggtcaatacgcttaaaggcctggcaatgcgcaaccgactttacatccatgtgcgcggcagactgttcgcacagcaggttcatttttcgcatgggacgtggttctacactggcggggacggggttggcccatcgcagaaaagggttatgctgcgcgagataatcgaacacggttacgtttggactaacgggatctactaatggaaacggtaaaagtaatttgcacgcacgctggctattcgccgctatccacctatttcacgcctggccgcgagtatgacgccatgttcggccccggccttgatgaagtgtggattttgcaggacgaccagaacaccacggaagacgaagaattttggccagcctgccgcatgccggacgaaaagatcgccatgtacgccaataggccatacgaaaacaacgttttgtttgaggtgaaagtatgaaagtaagcaaaaagaaactcgcgctgtattgggccttcttcctggctggccttgccctgcataacagcgtgggctggcagacgatcggaatgctgtgcatgattattggtgtatgccgactgtctgagattaacgggttccgccgtggatatcgggcagcattcagcggcgaaaaagaatagcactttttgttaaaactgccgtaacgtcatttgataaagtggcgttactgaagtgaaacaatccaatcaggagcaacgcaatgaacgataatttaatcgcactgctggaagaactgaattcctacggctgtgcatacatcgagctttctagcgaacacgttatcgaagtcattattgacgatgacgcagggttcaccaagttaagggtggctaccggggccgaagaggaattcgaagactgcggcatccgtgaagtaaccaaccttctcgaagttcaccaggtgaaggagatccgctaatgaaaaccgtcaaactaatggttgtcaatgcggcccgcgaacgtgaacgccaccttatcggctgcgtattcgatgccgtcgaggtaaaagactcaaaaggagactttcacgtaatacagggcggataccttaacgaatttatcgtcaatccgctggatactgacgaagatttgaccatccgtgttggtagcgagccggaaaacgcgcttttccacctgcgtaaagtatcgaaggcatcgcagcgcaagttgctggttcgcgcactgaagcgcatagcgaagcagcgcggctacaccgatgcatacatccgcaagttcggcacgttcgctggagtaggtgattgggcgcggtcatgggccgacttttatttcaacaaatccggcgaattttgttcagcgcatacggactggctgcatggcacggaacacgatccagttaacggccacgagtggtacgaattcattgaggcggaattagacgccctttgatagcacgaattgctaaaacgaacgtccggggatggtgcatactatccccacactaacgaacaaaggaaattacccatgaacaaaccaaaaatcatcctgatcccgtccgtcgattccgtggttaatacttatgctaaattcaccaaaggcaagcgctataccgcaaccgcatttaccaaatgttccggcgaaatgctgtacaaggtcagcgatgactacgggcgcgagtatcacgtaaacccaagatcttcgcactatcttggtggccatcgcttcgatattgagtacccgatcgaagattgcagtaagcgcgactcgttcacctacgatgacagccgttctatcgccattcgcgctgcaaccatcggggacgggtttattagccgggcctgcatcgttgatctgatcccgtccgataatcacgccaaagacgacgccgacacgctgttaaatgccgtcgttcgcgccggaatcggcttggagttaagtgatgcgtcgtgcgaatcattcatgcgtgaaccgttctcacgaatcgcggagcttgaaaagcaagttgcgttcctgactggtgaacttcaggccgcaaacagcaagatcgagaatgttcgcaaaatcatgcgtagcaagcctggccatgacattgaagattacgcgcgggttttgcgcatgatggccgacgcattcgccaaactttagcagtagcacgaattgctaaaacagatcaggggtaagctggtatagttaccccatcgaaacgaaacggagttacagcaatgaaaatcaaaatcaccaaaatcaacactcttaacggcgacggctcaattaccctggaagaatgcggcctcaaaatcggcgaagttcttgaggtcgacggccacttcaacgacggctcatactgtgtgatcgctccgcgcaatagcgagtttatccaggctggtgacaatatcagcgtaagcgcagacgaatgcgaggttgtggaagaatgagcaacaaatttgggtactgacttacaccattggaaccaacgaggggcgcaaatcgcgccgcctcatctgcgacaccaaagagcgggcgattaggcagcaaaccgttcttggtggcgaacttgtcgagtatctccgcaagcctgaagcgttcaaggtgaactggccggaaggcatggatatcaacggcgctttagcgagcctgcgtgaattgcagaacaacccgaagacgtggagcgactttcaatgcctgcgggcggagccggaagtgaaggccgaccagttcaccaatgttcggtcgcagcacgcggagtggtcggatcgccagttcggcgacgttgggccagtcgggccgctcaaacacctggcgaaagaggcgatcgaggccgccgaagcgccggatgacattagcgagttcgctgatatcctcatgctggtatgggacgcaacgcgccgcgccggattcagcgatgagcagttggctgaagcggtggcggaaaagctggaacggaacaagcgccgggcgtggggcgaggtcaaagatggcgagccttgccaccacgtaaaaaattaacgaaatcgaatgccgtttaaagcgcctgtaagccattctggctggcgcaaatttaaggagtacgattgtatgcctgaatactcgaaagtcgaagatatgccgattggtgcaacaattactggtatccgcatgagcgagtcggacgacgccatcaagccgctggcgttcccggttacgcaggtggagacggacagcagaaaagggttcatcttcatctacaaaaatttcaatagtccgctgcgggttgaagtattcatcgctcgcggaacctgggtagaatgggagaaggccaaatgttcggactgaatgaagcgcagtacaacgccgtaaagcgcatagcaaagcagatggccgcagaaacaaaagacgccatcaagaaggacaagaagacctacgatcaggtcgccgcgaagatgatcgataaacattgggcgcaaatcaacacgctggttactcgcggccagtttatatggatagctggctacctggaaggccgattcggtcgaagggatggcgagtatgaataaaaaacagccaaacgattcagtgacctattgacgcaatcgcgctgatcgggtaacgtgaaccatgtagacacaagaggcggtaaacatccgcaagcctggccccggttaggggcgtttacataggagttatgatgcaatataaaatcatgctcacagcaagaaaaatgggtggcttttgcaaatcctgcattcaagagttcagcatgactattgaggcgaacgacaccgccgacgcggtagagaaagcaaaaaagcaatccggcgtaaatctggatacgcataaaatcaacatcaactacataagggaaatcagatgatgctaactgtgattattgctcttttaatgctttttataggttatcacgtcggagcggctcaccttgtagagcgactttcaaagcgggtacatgaaggcacctttgctgccatgatgtacaataagaaaacggcacgttgggaaaaaattggcgatccggatggtatcgcaaaacgaattgctttttcgccgcttccgtatgttgactgtgagctatttgtgaaactacagaagacgctgaatcggcgaaacaaactgatatgacaaaagaacccgcttcggcgggtttttttatgcccgcgatctgatatactcgcaaatcaacacagaaggaggattacaa

SEQ ID NO: 243 - DNA, 49450 bp, synthetic construct
  source 1..49450: mol_type = other DNA
atgtctgaagaacgtagaaaacgcgtaacgaaatcgcactttgcaggcaactttaaagcgctatatgaaaaggagttcggcgtggtgctagggcgcacggcagagatgacgccggaacaattttttgatatcgcaaagcgttacttccagtgggccgaagataacgcaatcaaggctgcggagacggcaacgtttcagggcgacgttaacgagtggggagtgaacaagcctcgaatttttacgctaacagggttaagcctgttttgcggcgtgaaccagtcaacgcttacacgctatcgccacgatcctaactatgctcccgtcatggagttcatcgactccgtgatctatgagcagaaatttcagcttgctgccgtcggcatgattaacgcttctttcgtcggaaaagagatggggatcgataagccaccagtgctgaacatcgacgctatcgccggggataagaacgagatcaccgaagagaggttagagaaggcagtgaccaatattcttgataagctgtaagggtcagatatgaacgaaatgatcatttgggaagacctgtcgccagccgataagctggcaattaaggcgcttagtacgcgcaacttttcgctattcatgaagatctggtttcagatcatccagggagaaaagctgatgtggaactggcatcactcctacttttgccacacggttgatgaaattatcgccgggaagcgcaagagcacgatcgttaacgttgcgccaggctccacaaagacggaggcgttctcaatccacctcgcgccgtatgcgtatcttaaatgccggaaggttcgaaaccttcagatctcgcagggtgacgcgctgtcaaaaggcaactccgatcgcgtgattaagatcttctcatctaacgagtggcaggagctatggccatcaaagttcgggcgcaagcagatcgatgaatttcaggtcatggacgataacgaccgcgtaaggctggaaatggtctcccgttcgtccggcggtcagatcgtcggtaagcgtggcgggtacatgacgccaggtttcagcggccttatcgcgctggatgatatcgacaaaccggatgatatgttctcgaaggtgaagcgtgagaaaaaccacgtactcctgaagaacaccattcgatcccgtcgagcgaagaagaagaaaggagacgaaacgccgatcctttccgtgcagcagcgattgcacgcgcaggattccacctggttcatgatgagcggcggcatggccatcgacttcgatcggattgttatcccggcgatggtaacgcgggaatatggcgaatcactccctgactggttgcgacctgagttcgagcgcgacgtgctttccggcccgtcggtggtaattgacggcgtggaatactggtcattttgggaggaaaacgaatcgatcgagaacctggttgcgctacgcgaagccgatctttatacgttcctttcgcagtatcagcaggaaccgatcgccctgggtggcaacgtgttcaagtcggagtggtggcgctattacggcgattccgacaaggcgcacgagccgcgcccggacaagttcgaatatacgttcatcacggcggacaccgcgcagaaggtcaaggagctaaacgactactctgtaatgtgctattggggcaagtatcgggatcgcgtctacttcattgacggaattcgcggaaaatgggaagcgccagatctccgcgttcaggccgaagcattcatcaagcagtgctggcgtcggaacaaggagtgcggaaaccttcgccggatctacatcgaagacaaggcgagcggtacaggtctaatccaggatttaacgaaggcggtaaacggcatgggcgagatcgtcccggtgcagcgcgataaagataaggtcactcgcgctatggatgcacaaccaatcatcaagggtgggcgtgtcgtgctgccggacaatcacccattcgttgcagagcttgaggcggagatgagcgcgtttacatatgacgattctcatccacacgatgatatttgcgacaacgtgtttgacgccgcaaacctggaaatgaacctgagcgacgatccggtagagcgaatgaaacgccttgcgggattgaaaaagctgggtcgctaatacataatgtgggcctgacggcccacacttaaacaaggttgaaatatgaataacattaagatggacgactataatcaaatctttaatggtggcgctggttatgcgtcaaccctcgcgtctatcgcggcaagatttggaacaatgtcgcaggttgaagagttctatcatgaaaacggcatggcgaagaaaatcgttgacgtgatcccggaagagatggtggctcccggcttccagctaaacggcatttcagataacaccaagtttcaatcagaatgggacgggttaaatctggagccgcaaatcaccgatgccctttgctgggcgcggctgtatggtggctcctacgtcctggcgatggttaacgatggtcgcgcattgacttcagcagcgaagcggggtaagccgctcgaatcgatcgttgtttacgaccacgattccgtttccgtcgcagaggaggaaaccagcccgcgaagcccacgattcggaaagcctaaaatgtacgaggtgaagccgctaaacggcgggcaaccgttcaaggtgcactatacccgtatgcactacatcgacggcgagcgagtaaccaacaaggtgcgcaagctaaataatggcgctggcggttcggtgctgaacaagtcaatcattgaagctattcttgactacgactattcggaatatctggcaacgcagctactgaagcgcaagcagcagggcgtttggaaggcgaaaggcctggcgctaatctgcgacgacaaagaaggcgagtacgccgcccgtttgcgcatggcgcaggttgacgctaattcaggcgtcggcaacacgatcggcattgatgctgacgacgaagaatacaccgtgattaactctgatatttcaggcatcccggaattcttgtccgctaaaatggatcggattgtcgccctgtcaggcattcacgagatcgtgctaaaaaacaaaaacactggtggcgtaagcgcaagccagaacacggcgctacagacgttctacaaactggttgaccgcaagcgcaatgacgattacaagccgctgttagaattcctgttacagttcatcgtaacggaggaggaatacagcgtcgagttcgaaccgttgtcgctgcctaccgatgcggagaaagcggatatcttccagaagaacgccaacgcggctcgcggcctcgttaccgaccaggttattgacgccaacgaagcgcgtgatactctgtcggcgttaattcctgaactgaagctaaaaggcaacgctccgaagcagaaaaaacttccggatcgcgccgctggttcaggcagcacgcaaagcgcagagatcttaaacaacacggaggcggatgatgaaagttaacggcagaatcccaaactggcgttatcctgaagcaagcgagcgggatttatcccgctccatgcaggacgcggtgacagaactcgtggtagaaatgcgggatcgcttagaccgcctgaaatttgacgccacggcggaggagatcagccaggcagaagacgatatcagcgaatcggccatcgtgttcttttccgccgtaattgcggcgctttcctccattgggttgactatctatagattcaattctaaacagtggcttgcaattgcgattgcggctggcgggcggaacaacgaatcagttatgcgccttaaagaattcggcgctggcgggtatgaagactggtatcaagattcgttgaggaagtgggaagataccgccgaagcgtcgatcaggaagttagcaagcgatatcgttgctgactggacgacgaaagttagaaccgccaacaacattggcaagtctcgccagcagatcgatgaaatcatcgaagggcgctacgcgatttatggtagctggtcgcgcaaccgggcaagcggaatcatcggaacttttaacagtatgttgatgatgcagcgcctaaaagatgctaaagtgtcgcattacttttggttcggcatgatggatgaccgcgagcgcgaaagccatatcaagctagaaggtaagcgacgccctgttaatggtgatggcattttccccggcgaggagtacggttgccgttgctgggcggttccgtcatttgataatgaggatgattgatggttaactttaatgattactttaatcacgtaggaaaggatctgatatggaagcgagcaacatcaaaccgagtaaaagttggtgatgttgccgggtggaaagatgagcatgggtatgtatacattagattcatgggcaaactgcgacaagctcaccggatcatttgggaaatgcaccacggcacaatacccgaaggaatggaaatcgatcatattaaccatgtaacggacgataacaggatcgagaatttaaggcttgtaaccagaaaggaaaactgtaaaaacgtatcaatgagcgtaacaaacaagagtggagttgtcggcgtgagttggtgcaagagaacaggtaaatggtttgcatccataagggttgataaaaaagagcgattcttaggtagatacgaagacaaaaacgaagccatttcagcaagagaggcggcagaggtaaaatacaatttccataaaaatcacggagataaaaaatgaaaagagttcaaaggttcgacacggtaaagatgaaggcccgatttgatgagaatggctttctggttgacactccgattgtggcgcgtatcggtgcgcaaacgtaccagacgccaaccgggccgcgagtcgagttccgcccgcgttctgaggtgtttgatgctgaatcgctggcttcataccagggaaagccgatcactttgggtcacaagatggttaacgcgcagaatgcgaaaggcctggttgttggctcgtgttccggcgctggcaaagaagaagggatcggggttctcgttccggtaatgatttacgacggcgaggcaatcgagcaagcgaagaagcgcgttgccgctgaattgtcggttggttacacttcggcagatatcgatcgtaagggttggggaaacaacgccactggcgaatatcacttcgatgatgaactaccggaaaacttcgaagagatgaaaaatgattccgtctctgattgggttcgctttgatgcggtgcaaacgaagattcgcgtgaatcacgtcgcgcttgttttccgtgggcgagcagggattgcgaaattaaatcttgatagcgaacaagaattcccctatgatgacgactcaaaccacaaaggagctaaaacaatgatcattaaaattgacggcgtagatgttgaagtggccgataacgtaggcgcttacattgccaaactagacgcgcaagttgcatcggcaaccagtcaggtaacgagcatcaccgcagagcgcgacgcacttcaaaccaaagttgatggcattgaagatgaagttgccgcccgcgttgctaaaatcaaagccgacgaagacgcaaaacagaaagttatcgcagttgtttctgccgctggcgtcaagtgtgacggcctggatgttaaggcaatgaaagttgcttacatcaaagaggtagacggtcgtgatctgtctgacaaagaagattcgtacatcgacgcttcttttgactttatcgccaactctgataagatggctggcaatcgctccaaagtcttcggcaaaaaagaagatggcgagcaaaaagacaaaggcggcttaccgaaacttgacggcaccgaaatcatcgatccgcaggcaaaattccgccgctaataatttgcggccttcgggccgctaccagaccaaataaacaggagattcaaaatggcacagattccagcttcttattcccgcaagcgtgatattgctgtagcggggcagatcgctgatacgtcactttacaatatcgacggaacttgtgttgctgaaggcgatatcaaagctggcgtactggtggcttccactggcgcagtttccaatggccacaaggtagttaaaccagcaaccgcagcgagcgacgtcattgtaggcatctcgcagttctcgcaagcctactcgcctgaaggcaagtatgacgatgagagcgcagttaacgttatgactcatggccgcatttgggcgatcgctgacgcaactgttactgaagaagattgcgcgttcggttctttcgtcacctttaccgcaaacggcacagtagcgaagggtgatgccggggttatcaaaactggctacaaacacactggcgaatacaccaaaaacgcagatggcactgttctggtgaaagtgcaggtgctttagggcgctgtagctccagcggctacaactggcgacgctggcgtataaaataaggggcttcggccccatttttgcaccagaaaaaaacctttgacggcttaacgattcgtgatattcttcatctcgttaagctaaatacacaaacaggagttttcagatgactatgaaattagatgcattcgaacagagtgccattaaggtcgcaatgcagggcatgggcattgatgccgcaaaactggatgcttacggtatctggactgttaagcagatgactcaattactgaatcgccagtatgagcaggcatacccgcagaccagcgcacttgagcttttcccggtaactaccgagatctcgccgaccgcccgccgctttgagtggctcgaattcgatggcgtaacttctgcgaaaattatcgccgattacaccgacgacctgccgaccgttgaagcgatggcgaaagagaagtcagggaaagttttccgcctgggtaacgcgtggtttatttccatcgacgaaattaaaactggcgcggcgctgggttccagcctgagcgatcgcaaggcaactctggcccgcgaaggtcatgagacgctcgttaatgatctggtgttcaaaggatccgctcctcacggcatcgttagcgttttcgaccatccgaacattaaccgcatgaccgccagcgcggcttggggcgatgacgcagcagcggctgaaaaggcattcgaagatctggaagacctgctaaacatgatcgaagaaactacgctgggccgccatcacgcgaccaacatcgtgattcctccgtctaagcgtcgtcttctgacgaaaaagatgcctgacactagcggcgactcttatctgacctggttcaccaagaaccacccgaacatcaccattacggcgatggcggagctggaagatattgacggcgcaggcaccaaaggcgtgctggcatacgaaaaagacccaatgaacatgagcatcgagatccctgagcggttcaacatgctgccgatgcagccgaaagacctgcatttcaaagttccgtgcacctccaaatgcactggtctcatcgtgtaccgcccgctgactattgcgattctcaccgggatttaatcaaaagcgccttcgggcgcttttttattgcattgcattctgcaatgtgctttaatttgaaacctaaagtaaaccaatggagcattaacaatggccagtaaaaaagaaaccgtagaaaccgtagaaaccgtcgaaaccgtagaaaccaccagtgccgaacaggcgtcgcaggttgttcaactacaaaacgttggtgcatgtgcaattcgctataaaggcaaaaattacgtctatgagcaggtttttgaagtgccggaaaacgaaatcgaccgattccgccacgaaatcttcaaaggccgggtcgaattctacgacaatccgaaacgcacgcgcgaatacatcgcagcggtgaaggcgaaagcgaaagagatcgtgcagcctaaaagcgcggaataacaaaaactaacaaagggcgcttcggcgtcctttttcatatcaggagagcgaccatgaattacacaattcaagatgtgatcgataaaatgcgcagccttgcacctccgcttaaagaagttccagatgaactgctgtctgcgtgggttgtgcttgccgaagagttcgtttgcaaatccaggttcggggattccatcgttacggcgatcgcattgatgaccatgcacctaatgtttttggatggagcgatgaagcaggaaggcgaaagcctggaatcttacacgcagcgagtggcatcgttcaccctgaccggggagttttcccaaaccttcgatcgcgtatcggcgtcaagcgacaacgaaatgctttctacgccgtggggcaaaatgtactggcgtatgctcaaaatgcgaggcggtggcttcggcctccttaccgccgggaacgtgcgccgctgcggaattggtaggtgatcgctatgaactacaaacaaatccaggcacgcgcaagcgcgggcattaagtttttcagtgacgctgacggcgtattcaacaagtacacgaaaggcgctggcggcggaatcgatccggaaaccggggaagatatcattcctggcgaggtggtaacgacaatcaagggcgcgatcagggatgtaaattaccgtgacattaacggcgaaaccatcctcgctggcgataagcgcgggtttttcactcatgatgtgccaatcatggagggtgacgaaatcgaagtagacggcgagcgctaccgcgtggttaatgcccgtccggtaaaaccaacgggaaccgttgttgcttaccgtccagttttgcgcagggtggcgacttatggctaattacacgatccgggagttcacaggggcaattgatgcatggtgtaaggccgctggtgatgcgctggaggacgttgtaaggtttacgtgtgaagatattcaccgcgacctcgtaatgcgttctccggtggatacagggcgcttccgtggtaactggcaaatcacctttaaccgcgccccgctttacgcgattaacgcatatgaccaaactggcgaaaagacaatccagaacggcaaagccaacattgcactatacgcaaaaggggctgggatcacttcgatctggttcagtaacatgctaatctatgcgaacgcgctggaatacggccattcaaagcaggctcccaatggtgttatgggagttgttgcgatccggttgggcgtttatgttactgaggcaatcaagcgagcgagggcgaaaaatgcattatgagatggcgttaaaatgcaaggcggcagtggctaaatttgccgccgagaacgggttaatggtcgcaggagataacgttgactttaagccaccaaaacacggtgaaacttatctcaagttctcctacgtagaagcggattccagatctgtcagcctttccagaacttgccgcgtttatctggctatggtgcagattgacgttgttttcaaacccgggatcggaaccgacgccgcgcggctaatcgcgcaaaacgttgcaaaatccttccccgaaggcaaggttgttgattctgaaagtaagttatatgtgagcgagtgggcggaagtgtaccgcgttcagaaacacgaaacaggctggctcctacccgttcgcttcacagtaagatgcgaaagcgcggaggagagcggttatccatcaacatgactggtcttagaggtgcttataatttcttgccagcctgtaaatatataggcataatggcgttgttaaactttcatcaaaacaggagtattcaacatgcatttaccaaacggtgcaaaggtcttctttgagaaggctcgcggtgcggccattccgtttaccgcaatgaccaacgacgcgaaaaacccaaaaatcacagtggcggacggcaagctgaaggtgaaagatattgtgatcttcaccgattgcacctggggcgacttcgttaacaaggtggctcgcgtaaaagcagtgacagcaggtgtggcaacgctggaagagttcgatacctccgacactaacaagtatccgggcggcgcggccactggtaacgtgagcgtgatcactgattgggtcgaattgccttgcattcaggatttaggcaaagacggcaacgaacagcagttctataactatcagtgccttggcgatgagcgcgagcaatcagaacctacttacaagtcggcggtgacgcttaactacacgtttgcgcacgattacagtaacgcgatctaccctgtgttgcgttcagccgacgccagcaagcaggcgagagcgatgtacatgtatatcccgcgagcttccgaggttcgttactggtctggaattgcatctttcgatgacattccttccacggctgttaacgagatggaaacggtaacgcttaacattgcgcttaaaggtgctcacgtcttccttccggttgtcgtgtaattaaatggcggggcttgtgcctcgcctttttttgtgcataatagcgaataacacaaaccaatcaggagttaacaaaatggctaaattcaaaattcaaattggcggcaacctcccttctttcaaactgcccgtaaccttcacttgcccggatggcaaagaagcgaccatcaccatgaccgtaaaacatcgctccaccgatgagatgaaagacttttatgagagcgaagataaagcgccaaagggtaacgccgagtttatccgctttatggccgaaggctgggatcttgatgatgagttcaacgacgaaaacatttcctggctttgcgctcacttcccggcgttcgtcatggcactgccacaaacttacatggccgcgcttgcgggccaccgtgcaaaagtttaaggcgggctgtttatctcacgcttcagcctgagctaaccgatcgccagcttgccgagtacgggttaaggcgatcggattatgaggcagatcttgaaacgatctactttgatgaacagaccgcccaaagctggcagctattccaggccatgcaaacgcagtggcgcattgggatgaacggcccaacggggcttgactataatacattgcctatgttcttcgaattgtataaaatcgacaatcgagaagcggcattacttgacttgcaaatccttgagggtgaatatctgaaggagatttacaagaaatcaaaataagcgcctacgggcgcttttttcatatgggggctaaacatggctgataaagtagctgggttgacgtttggcgttgacgtttcgcaggttgataaagcggtacgatcactagcagaactgaaaaaccaaagccagcaaacaggcgctggcctacagtcacttgcggacgctgaaaggcgggccacggcgcagaccgaggaaatgaaccgcgcgttgcagcgccagaagcaagagactgacaaatcaaaaaccagctttagcaggatcgcaagcgccatcgatccaacgatcgcaaaaatggccaacttgcgcaaagcgacggaagaacttgataaagcgtgggcgctgggtcttgttccggacaaggaatttttccgccttggcgctatcatcgagtctaccaccaaccaactccggcggcagcaggcggcgctaaccgaagaaggtcgcgcagcaatcgcagaggcggaggcaaagcagaaggcggcaaacgccgggcgtgattttgtcgccagtctgaaacagcaggctgactccatcgggaaaacacgcgccgaactgctggaaatgaaggcggcgcaattgggtgtatctgcggaagcggccccgttcattaatgccctgaagcagcaagagcaggcgttaaagaaacagcagaatgcgatgggcctggctggcatttctgccgggcaatataaaatggccatgcgccagttaccgatgcagatcacggatattgtaacttcccttgcgtcaggtatgccaatctggctggttgcggtgcagcagggcgggcaaatcaaggacagcttcggcggcttgagcaatacgtttaaggtattgttgagctacattaacccgctaacggttggtgctgcgtcgttgggtatcgccctggcggcaatcgctaaagctggttatgactcctggaaagcgcaacgagaactggcgaatgcgctggtgctgactggtggctatgctgcgaccaccaccgggcagatcacagccttaaccgaagagattaacaaaaactcatcggctacgattggcagcattcaggaaatcgcaacatcgctcgccagttctggtaagtacacaatcaaccagattaagcagatcacgaagactacggcggaatggtcggcgcagacgggtgagagcgagaagacgatcacagggtattttgattcgatcgcaaaagaccctgttaaggggcttgccgatctcaatgagcagtttaatttcctgaaagagggccagctaacctacatcgaatctttgcgtaaaaccaaaggcgagacggcagcagcagaggcggctacaaaactgtttgctgatactatggataagcgccttaaagatatcgcggacagcgcaacgccactcgaaacgatgtggacggatatcaaaaaatgggccgctgactcatggaaatgggtaggcgatcacacggtaggggcgctaaaccttatcgttgatacggtttccgcgatcattaacacgatcaggaagctgattgccgacggcgacgccatgatcgcgcagttcatcgttgacgctggccggaagctgcaaaaaattccaggaatgggcgactttggcaatgaatttctggcgcagcaggagcagctaatcaaggactcgaaagcgaaatccgacacgcttgcaaaaaccattgcggaacagcaggcaaggatcgcaaaaggcgaaatgggttacattgatgccgcgaaggataaaaccctttccggtgggtacagcagcaaaacgaaggatcgcgtaaatcaggaagaaaaagatatcctgaaaaaccgcaacgccaggaagcagcaggtagacgcgggcgttaaaattgatgagcagtatcaggctgaactgctatcgctacaggcgcagctaaaggttttgcagcagcacaaagggcttgacgacaagatcagccagcagcgcaaagactacttcgagacggttgctaaattccaggttttggaagaggcaagccagaagcgaaaactgacccaaagcgaacagcagatgctggcgaacaaaaagaatatcctgtacatggcggaacaaaaggccattgtgggagatcagattgttcagcagcagcgactgaacgccttgcttgacaagtctaccaagtatcaaaaccagatggcggagaagaccaaggcgctacaggataccgccggaatgggtagcaaggagcaggagagataccgggccaatgcgcagatggcggctgactggaaaaacaacggcggatctttaagtgaccctggatttaaagcgatgcaggccgcaagcgataaattctacgcacagcaagatgcgcaaatgatgaactggaaggccgggtttactaacgcgtgggctgacattggcgaagaagttaatgacgtatacaccaatatcggggatatcactaaaaacgcatttaacggcatggcgagcgtgctgactgattttgtcatgactggtaaggccagctttagcgacttcgcaaagagcgtgatcactgacattaccaacatgcttatcaagatggcgctgtttaactcgctttctgccgcgtttggtggtggtggaacgttcagcttcgccagcatgttcagcaaaggcttttctggcggcggttacactggcgacggcgggaagtatgagccaaaaggcgttgttcacggcggggaattcgtattcaccaaagaggcgacgcaaaggttaggcccggaaaacctgtaccgactaatgcgcggctatgcaagtggcggcctggttggtggtaacgcaagttccggatctggaatcaccaacggcggcaacgtcgcggcgtcggcggctatggtgtttaccattggtgatattaacatcacgatgggttccggtcaggatagcaaggggctagagcagggcgtaaggcagatcgtgaacgatatgttcaccgaggctttgagccaaaacgggcgcattgcgaagttcgtcaatgagaaaacgaggaggtagtagtggattcctttaaatggtgtacacaaatccaaggaggggcggcgaaagtcgccgtatccaataacgttcgggcgatcagcttcggaaatggctacatccaaactgcgtcgagcggcattaacacaaagcgccggactgttccgatcgtttatggcggttcggattgggaagcggtttataacttctgtcaggatcacgtaacaaagccttttgtgtggaaggcaccggatggaagaatgggcgtgttcgtcgtaactgccgactccgttaaccttgcgccgcagggtggcggggtgtttgaggtaacggctgaattcgccgaacgcttcacttcagccggataatcaaaaagcgccctttacgggtgcttttttttggcctatgatctggagtcaattagaggagggcttacgatgacagccaatgtttcaaaagattttgcgaactgcctacaaaaacttttccccggcgagatcctaacgctgatcgatatcgacgccacaaagttcggcgggcaggtctaccgattccataacgagaacgtcgcctatacaaccgaggagcttttggccgcggttaacggcgggacgcttcagccaaagatgatcacgtttcgcggcgagcagtacggcccgcgaccgttcggcctgggcgggatcgcaatgtcgagcgatggcacagtggaaaagccaacgctgacggttagcaatattgatgcgcaagcgagtgctcttattcgagcctataacggccttatgcaagccaaagttacggtatgggttttggtcaaggaattgctacaaaacgacggcagcgttaaagagggcgattttaggcgatttatttactacatcgagcgcccaaaacaggtcgacccgcaaaaggcaacgttcgaattaacatccgtgtttgatatggatggattaatgatcccggcccgtctgacgcaaaccgtttgctattgggcgcagcgtgggtggtacaagtctggcaaaggctgcgactacaacgggcagaacggatacttcgacaagttgggaaacagggttgaagacccgtcgcaagatgtttgtggcggcttggtttcttcttgcaggcttcgttttggcaatgaaccgttgagttttggcggttgtgcgacagcaacattgaaaagtggaaggtaatatgttaactccgaaaatcaaaatgcagatcatgcagcacgcgaaagaagtttacccgcatgagtgcgcaggtctggtgacgcaaaaatcacgagtgcaaaaatatcaccgactcgacaacgtttcgccagatcctgagaaagaatcaatgcctgatgaaacgcagtatgcgctggcatcaatggagggcgagccgatcgccttcgttcactcccacactggcgatggggcaaccacaattccgagcgccactgatttatgcttttgcgatgagtctggcttgtcgtgggttatcgtctccatcccggaaggtgatatgcgaatcattgagccgaaacgccgacctctgattggtcgcccctgggctttgggcgcttacgattgctatggcctaatcatggattttcacaagcgccacggcgtcacactaaaagatcggcgattgccgttcgaatggtggaagccggaatacaaagagaatctttaccaggattactggcaagaggacggattcattgaaaacactggcgagcctgaagttggcgatatgatcatcttccagattcaggcggaaaagtggaatcacgctggtatttacgttggaaacaataacatccttcatcacgcgtttggcaagctgtctcgcagggatatctattctggatggtacgagcagcacaaggttttaatttgcaggcacaaggagcttaaacatggcatcacatacaaagacgattaaactatccggttccctggggcgtcggttcggtgtcttccacaaacttgcggttgattcagtcgctgaatgcatccgggcgctgtcttaccaggttgaggggtttaagcctttcatgcagagcaaggttggtttaaatatgcgcttcggcgttgtcgccgacggaaaaccaatcagcgcgaacgaccttgcgacttttgccgtggcgagggagatcagaatcattccgatcccaaaagccagaaagaacggcgggttgttgcaggtcgttatcggagcggcgattatggttgcggccttctttactggcggcggctcgctggcggctatgggcgctttttcatcggctgcattcatggctggcggctcaatggttttgggtggcgtaatgcagatgatcgcaccgcagatgggcggcaatatgcgggcgagcgaatcgcctgagaataagccatcgtatgcgttcggcgggccgattaacaccacggcggcaggttatccaatccagttgccatacggttacagattggctggcggcgcattgttcggttctggatcttacgcagaagacaacaactaattaagccattcgctttttagcctgggggcgtagcctccgggctttttgtcgtgtacaattgcgagactattaacaggaggctaaacgatgactaatatcaaggcccgtaagggaggctcaagcaagccgcgtaccccggtagaaatgccagataacctgatctcaaaagacaagatcaagttattgctggctgtttctgatggcgaggtcgttaacgacttcagtttgaagcagttgcatttcggcggcgtcccggttcaaaacgaagatggaagttacaactatgaaggcgtgattgctgagtttcgccccggcacgcaaacacaggactacatccagggcttcagcgaatcaagtgctgagttccaggttgctcgtgaagtcactcacaacacgccttatacgcttaccgtatcgaacaaaaatctgtctgctattcgctttcgcctgttatggccgcgcgtgctgactcaaaaagataacggcgatatggtcggatcggttgttgagtacaagatcgagatggcggtagatggcgcaagttatcagacctacctaactggcaaaattgacggaaagaacacgactggcggttacgatcggagcattcgcgttaacctgccgcaaaacttcacgtcgcaggttcttatccgcgtgagccgagtaacgccggatgctgacggggtgaaggttgtcgatgccttccaggttcaatcctacgctgaggtcattgatgcaaaattccgctacccgttaacggccatgctttacgttgagttcgatagcgacctgttccagaaccagatcccaaccatctcactcaaaaagaaatggaaaattattcaggttccgagtaattacgatccgattaatcgcacatactccgggacgtgggacggtgtttttaagtgggcgtggagcaataacccggcatgggtgctttatgacctgatcatgaatcagcgctatggtttagaccagcgtgagttaggaatcccggttgataagtggtcgctgtatgaggtggcgcaatactgtgatgaacttgttcctgataatcgcggcgggatggaaccgcgctatttgatggatgtaattgttcaatcgcaggttgaggcgttccagttggtaagggatatttgttccgcgttccgtggaatgacgttctacaacggggaaagcctttcgattatcgtcgataagccgcgcgatccggtgtacctgtttacggctgataacgtcgttgatggcgttttcgttcggacgttcccaagcgaaaagacgatgtacacgtcgtgcaacgtcatgttcgacgacgaagaaaaccagtacgaacaggatgttgaaccagtattcaaccctgacgcagccatgcggttcggccacaacccgaccagcattacagcgatcggatgtaccagaaggacagaggcgaaccgccgtggtcgctggattctgcaaacgaacctaagcgccacaaccgtttcgttttctactggcctggaaggtatgattccttcttgcggcgatgtgatttacgttgcagatccgcattggcaatcggcctttaacctggtgctatcaggccgcgttatggaagtgtctggcgtgcaggtgttccttgcctaccgctgcgacgcgaaggctggcgacactctgatcctgaatacagacgacggcaagccagtgcgccgcacaatcgccagcgtttcggcggacggtaagaccatcacgctaaatgttgggtataactttgacgttgcgcctgacagcgtattcctgatcgagagcgatcagcttgcagcggaacagtatgtagtaacccggattgaaaagggtagtgatgacgacgaatttactttcgccatcacggctacgcagtacgatccgaacaagtatgacgcgatcgataacggggtaattaccgatggccgaccaacttcggttgtcgaccctgattcaatgggcgcaccgaaagacttaacgattagctctttctcccgcattgttcaggggatgagcgtcgagacgatggttatcggatggtctgccgtgcagtatgcaaaactgtacgaggtgcaatggcgcaaggacggtggtaactggaacaacgttccgcgcactgcgacaacgcaggttgatatcgaaggcatctatgctggcgagtatcaggcccgcgtgaggtgcattagcggtgggaatgtagcgtctccgtggtctgaattggcaaccgccacactgaccgggaaagtcggagcgccaaaaggcccgattaacctgtttgcgtcggacaatgagatcttcggcattcgagttaagtgggctatgccggaaggagcggaagacacggcatacattgagctttaccagtcgcaaagcggaaccgatcaggacgcaagcctgcttactctgattccttacccggcggctgaatactggcactcaattttgcccgctggctacgtgaacttctacaaagccagaagcgtagaccggatcggcaatgtttcagaatggactgattacgctcgcggcatgtcgtcgactgacgttaacatcatcacagatgcgatcctggatgaaatcctggatagcgacgcgatgaaggaactacaggaaaacgcacaggatagcgcggcaaaactcaatgactacgcgaacagcatcattcaaaatgcgctggcgaatgatgcggacgttaggaaaatgacgaaggagaacggtaagcgtaaggcagagatcgcgcataccacggtgctgattgccaacgaatcagaagcgagggcggctgaaattacgcaacttaaagcgcagattgatgaagatatcacgtcgcagattacgatccttaacgaagccctggcgacggaaagcgagacgagagcaacgcagattggtcagttgcaggcagattttgcggctgatattgacggcgtaaaaacaacaatgaacgctggttttacgcaggttaatcaggctattgcaaatgaaagtgacgcgcgtgcaagttccgaggcggcactagatgccaaaatcgggcagaactccgcagcgctaaaccagaaactcgactcgtgggcgaacgttaatggcgtcggttccatgtacacgatgaagttgggcttgaggtacaacggtcaggagtatagctccgggatggccctacagcttacctcaagtggtggaagcgttgtttcgcaggtgctgttcattgctgatagatttgctatcatccgtaatgcggcgtctggcgcgtacacgctaccgtttgttgtgcagaatgaccaagtgttcatgaataacgcgcttattcaggacggttcgattaccaacgcgaagatcggtaacgtcattcagtccaacaactttcaggagaatgttgcaggatggaggcttgataaaaacggcgtatttgtcaactatggctcaacttctggcgaaggttccatcaagcaaacgaaccagaacatcactgttcgagatggtagcgggcgcgttcgttgccagttgggtaggatcactggatcatggtaaaattaatgccgggagaaatcccggcttaaccaaaggaggcagacaatggcttatggttttcaatcatgggatgcgaacgggaaccccaacaactatgggatcgtccctgtttcagttgctggatatattgcattagcgcaaggccagaaaagcggaacgtggtattacaacgtcccgcctgggttgaggcttggtttcttttgggtcgcaaatcaagaccagtacggcacatcgaagaggcgaattaccgttagtggtaatcagatcgttgtttcagatgcgccagatgatgcgctggaatcaggcgtctacccggcgacgcaaggttttattgtcgttcaaattatgagttgatgattatggcagattacggaattttacttaccaatgatagcggcaatgtttgggtttcgcctcaaagcatcccactggcactactatcaaagcagagcatcactcttaggggtggtactaactccgatgaagtaagatcggtaacttacgacacgaatcacccatgcgttccgttcgtggtctttcatggatcttcgccacaaggtgcattcacaaaaatcaagtacagcggaaacacttgcagcgttgttttttcttttggtaagcaaaacgtatatgcggaggtttattttttctccgtgttcccacagccaaatcctggttatgggcttgcaatttgggatgaaaacggcacgctgattttgaccaatgaaaccagaacactttcagacgtacagacctacggcactggttttaatctaaacgtcactaacggcgggaagtgggcggttagtcctgttcagttaggcgcgatcgttggtgttgttcgcgatccctacccaagaccatttcagggcgactattgcgcagcggcattctttaacggctcaagcacgcaacttaccgcatatctaacgcaggcaccaggaggagccgccagcgatctaacctacgtcaatatgaaaaacacctgcatcgctattgattgcgcaagatacgactaaaagaaaggggccatacggcccctttttctaccccttgagatttttgatctcctcttttaattcatcaacttgagcagacagagctttgattgcgcaaattgcatccatcaaaagagcattattgtcaagcacaagtttcttattttcaactacgttaccctcatcatcctgataggatgcgctgctttctttaacgtagcacgaatcgatatctcgcacctgctgtgcaataactcccctacgctcgcgtttcttaacatcatccttataggtgaacttgaccagattcattgctttgatgttttcgagtgactgcaaaccatcataagcaacaacattgtctttgtagttaatgtcagatagaccagcaaaaacaacgttgccataagcagtgcttgcaatattaccatctgatttaaactgccaatactgcgcattaccgccagttccccatttgctgacctcaataacggcacgatgttcataacccctatgttcctcaagccacatagcgcaacgcgcaccgttaccattaatgttgaaccgtgagataaatgatggagatttaaggatatcaccattattcccatttggatcgctagttggccacgctacaaaagcatcattaacggtactcctcacagtcccatatgacacaacacttccgcgaagatcggcagccccgccaactcgcaacgtgctcgacattgtaacagcgccgcgaagatcggcagccccgtcagcacgcaacgtgcttgacattgtaacagcattgctaaagtttgcattcaacccggtaacagcaaagttcgatgcatcaaaaacaacctgcttcgcgctgttcatatctccattagggcggaagtacattccttgaccattttcagggattgagtacacgatcgcattgctgttatttgccctaatagtgcaaccgttcagggtcagcgtggcgtttcctccaggaacgctaattgcctgcggctggctgaacgtgttagctacgttggtgcgcgggatcgtattatcattagccatcaaatagtcagacggtgaattatatacaattccagaaggctccgtgtcaatccaggtataaccagtgcgatcaatgattggccccgtaatcgaccctttgttagcctgtacgtttacatgattcaaccacagttcaggaacccatccgccgggagcatgaatataaacatcaaacgaggagtctgtgtttttcaccaccccaagattaatgcgtctggtgtcgtttggtctggcagcaatcagggtgcgctgagtaaaccaagtgtcaatattattactggttagcgtatcgggaagaccgcggccagaaatcgaaaagatatcaaccgggagatttgcagtgccataaccagtacctccgccaatgatgaactgagcaaatgcgtagccatcaccagcgttcttgacgttggcgatcttcatccacttctccccagcgaaagtgccagtaattttatccggcacctggacgccagccacaaggtcgacaacctgatcacgaagattttgcgtctgccccttcgcagtttgcgcgtcgttcttcgccgagttggccgcagtttctgacgcttttgcattggtctccgaggttttggctgcggtttctgatgcctttgcattggtctccgagtttttggccgcagtttctgacgctttggcgttggtctctgaggtcttcgctgcggtttctgatgcctttgcgttagtctccgacgtcttcgcagcattcttggatgcagcagcattggtctctgaagtctttgcagcggtttctgatgcctttgcattggtctccgaggttttggccttattctccgaagatttagcgttcgtctctgaggtcttcgctgcggtttctgacgctttggcgttggtctctgaagtttttgcagcgctttcagacgcagccgcagccgtagcgcttgcgcccgcagcttcggaatctgccctcacctgatcggcaagactttgcagagcttcgaaatcgaagttcttaaagaagtcgacagcatccgcaatttgagtttcctgtgactggtagtagcgcagagtttccgcaacatcttgcgccagtccgtcaacggtcagcgagtcacttaacaggatcgcgtaatcgctagacgctacgacagcgccttttgtggtgatggctttaatttcagtatcgctaaccaccttgtttacgacggccatttgaattggtgacgacaaaaacataatcgtcgcaccagggcgaatcagcgaaagcgatgattgccattttgtgccagtcccggtaacggttccgtctgcggccatagccgctttgccttctctgtatagtgccatgtttttaagcctcattggttgattgagtaacgcagataatagcatcaatgaaccgataaaaaaaggagcctttcggctcctttagttgtcaaattagaacgggatatcatcatcgaaatccatccccgcattcccgccgctgttttgcggcttaggcgcttgttgcggcttgggttgttgaggctggccccacccggattgctgattgccgccgccgctttgcgaaggatcgcgctggctgaattcgagttgcggcataatcatttcgttgtggctgtaaattgtgccgttgtgctcgcggttaacgatctgaagcgtccggcaggttacgctgatcaccttatccatttgcagcgcttcgtcgtaccacttaatcatgttttcttttgcaaagaaaactgcgcggtagttcgtgtaaattgtttcgtcctcgccatcacgattgcggatcttcatccgctccgacaggtctacggcgtacattttccacggcccgttattgttgctgccctctttgacataaggcgcttttcggattacccctgttacaacatgcattgtcattcctatggggcggcttcccgcccgttaaattagttgaaagatgaaatatcttgcgcttctggttcaggttttgattctaccttttccggctcgcgcttcgcaacctcttgcggtttaccggggttaaatccgtttgccggggtgactttcagttctgcctggcgtttggtgatatcgtcttccgtcattttccactccgccggggttaacgtttgtttcgccagcttatagatctcacgaagcgattcgagatcttcgcacgcgtcaatgcgttttttgaagtctttcggtgtcattttcgtaatttctgcatcatcatccgcctgcttgatacctagcgctgcggccagcgcataacggcgggcgtaagatgttgttgagccgtatgcttgttcgacggttttactgatcggcatattgtactgaaacgccatgaactcgccgctttcatgcaaaaacatagtttcgaggtgcatcaccttttcggtgctcgtatccatcatggattgaatgaccataattttgttcttctccagcgccggggaaatagcgtcgaggatatccccaagattcgcataggtgttcccaagatggttgttcttaccgcttttctttgcggccacgaagccagattttgccttgattaatgcggctgcgatggtggtaaatttttcagatgtacgcatgataaagtttccttttcctaattggtaatgcgcactatatcacaagtgcgcaccagtgtttagctatttgtgccgtatacgtccgggaacatgtatttcacaaactgaggagtcggcaaaacaacttccgccgcgtttgactcatatgatggccatgaatcgtgcttcacgcattcagcatactgatgaatcacgctttgatactgtttgcgaccgatctcgatctgctggctggtcagggtgaacgccagcggagcaaacggtgattttttctcctgcgttagcagtctgacaactaccgggcgtttttcgttgtaagtcttcacgaacagatcgcgctgcaatgccatcttgagatagtagcccaagttgaaggcgagtcgcccgaaatcgtcaggcttggaagattgcgtggttttgtagtcggtaatcaccacgacctcgaaaacctcatccgggttgaacccccactccttgatgagttcgggatcggaaacaacgtcaacatgatcgagtcgaaccttaaccttgacgccgaagatctcaccgaagattgacaattcacgctgtgctgtaggcgattcgatacatgcggcgtgtcgcgggttagccagcatcacgctgcgcatttgaacaacggcatcgaaatcaacatccttaaccagcttgcgcccggagtttatcgcggcgctttcgtcgcacagttcaatagcccaccaaacatttacgtcaatcccggcgcgatatgccatttccagaagttccgggtaatccttgttggacgtcccaatcaggccacacgctttcagcttcgcagacagtgccgacttcgacgtaatcagatctttaacctcgcccggagaagtcgcccgcaggtactcgccattaaactttgccgtctcaagcatacaggtatgcgaacaggttccgaacgccagcgcggctgcttcctcacgcactttgaatttccagtgcgccggggatgttgcgtaaatctcgccgaggcttgagccgctaacgtattccgcgcaccaggagttaggatcgtggtaatcatcgttggataattccgcgttggtgtatgccttaaaaattgcttcagccattggtatcactccatttgtggtttcgttgcgttaagtatacgcatgacgattccaggcgcaagtcaaaaagtgctatccgcagttggttaaaaaacgagcgaaatttacgtaagatttagtaagatgcatcttacgtgatttttcctatatatttcatttagttaatgcaaatcggtaagatggtaatatccctataggtaaatatccatgaaaaatatggcgcgaaatccagcgaaaaaagacacgcaccccggagaaatcttaccaagattgatagatacagatagagtaataataataatattgttatttatcatatacttactatctatatattgcggttaattggttaaattttgcgcgaaatttacgtaagattcatcttactaaatcttacctaaagtggttcgaccagctgcaagccactgaatttcaggcataaaaaaaggtaagactgatttgctcaatcttacctaaattctggtcaacatttaatcatagaagcgacgatgccctgtacaacttgcgttcaaatccgagcttaaagttgtcaccgttcggaacgataactttaagatcccgatcgtcagcagccgccagcatatcccgatctccacgacggcaaactacccgcatttctcgcttaccttctccgccattgcctttatacctgtacgccacgatctcgacgtttgaaggtatgatgcaggcccaaacgtcgcacttgaacgaactggcaatattaaagtgcatcgcctcaatccaggatcgagcaaggtaaatcggcccgttaccgtcgtcgctctgattggtcactatcaccgatccgaatgtcagatcgccagccaacatcttctcccgaccctcctcatcaatgaacagcatgttgcaatactcatcatccggcccatcctcatgcactagttgcattggtagcgcgtgaattagctcctgtctgcagttctcgtgagtttttacgccaaccagatatgatttgatatgctcattttcaatgccctcatagagcgttacaggcgtgctatcgacggcctccgttctgtttaaaactgccatcactctttcatgatctgccatctttccgtagtcatacccgttatcacgagctacctgcttgtttctcttgactacgtattcttgcggaacctttccgagatagcgcccaagaatgttgatgcactcgctatacggctggccgcttaacttcattaaccagccgatccccttatcggcaccgcaaccgccacagtatgcgccgccatcacctcgcgtttccagcttgtcagtccagcggaatcggtctttgccgccgcagttcgggcagtcctggtgcttgccgttgaagtatcgagagtggatgccgcaaatgttctgcaacgcctcgcgccacatgccagccatgtacggcaaaacctctttttcatcgtaaaaatccacgtcgtaacccccaaataaaaaacgcctacacgagaatgataacccggcaggcgtttagtgtttagtcaaattgtgctatcggactacgcggagcatttcgcggcggtcgcatcggcgcgtcactggcttgccgttgctgtcaaatcttaaatcaggtcggcagaatgaggcgcgaaaacctttgcaattgttccgtcggtagctcttatgtactagataagcgccatcggctgagatcataccgcgcttacgccactgctgaacaacctggatactaactcccaactcttttgccgttccagcgataccaccgaaggcatcaataaccagctccatccgcgcagtcaacccagctcgaacctcatccttcagcacgtagtaaccagtcggtcgcttgcgtttcttcttatctttcccgcgcgacgttccgttgttgccgttcaaggttcgcttatcaaccattgccatttgctccataattcaaccctcatagcattttttgttaaacctgataaaatgttccatgtattatacacgcaactatgcgaatgacaaattaggattgacaatggcaagcacagaagaagacgtagcatattttaagcgactatttcgttatgaaggcggaacactgattcgcaaagttacaaccagtagtcgtgcattcgctggagactccgtagggtgcgagaacaacgttgggtatttacaggtaagcgtaaaaagcaaacccctatacgttcaccgaatcatttgggaaatgcataatgggcctatcccagaaggaatggagatagatcacatcaaccaggtcagaacagataacagaatcgaaaacctgcgactggtaagccaccaagtaaaccttaaaaaccaatcgatgaacagtggcaatactagcgggcacgctggcgtaagctggtttaagcgaggcggtaagtggagggcaacaataaaggttggcggaaggcaaatacacattggttacttcgcgtcgtttgagtcggcagttgccgcacgaaaagcagcagaaaaacaatatggttttcatgataaccacggagcagagaaaaagaaatgagcttatcgattgagcaacaaatagatctatacgcagacaaaatcccggcaatccaaaagagatttaccgttggaaatatcgttccgtatccatatcaggctgtggcttatattgagacagccaaaagaatagcaaactacaccgcaccgttttacattaaggcttcggtttccgccgggaaaaccatcatgatcgccatgctcgcagcgcagtgcaaggcaatgaacttacccatgatggttcttgctcgccaggccgagatcgtgaagcaggattcagaggagatcagtaacctcgacgttccgaactccgtttattgtgccgggttgggcacgaaggcggcatacttcccgatcgtcgtcggatctgaagggacggtggttaatggtctgtttaaaatgctgggtgactatacaccttcagttctggctattgacgaatgccaccaggttgactggcaagatttggcggaggcgatcgccaacaatgaatcgttcgagtacatgagcagaccgaaggataagccgtatcgcgtgaacggtgaactggtcgatgccgaccacccatacgacgaaaaattcgactacgtagaattcggcggcggtcgaacacagtacaccatcgtcatttgtgagttaatgcggaggtgccttgagaagacagggcgagaacttcgcatcgttggctatacgggttcggagtttcgcggcgtcattccgattttacaggaagacaagagccagcctggtttttggcgcgagcagatcaccgacattaacacaaactatcttgtcgagttcggatcggtggttccgacaatttttggtgatactgaatccgaagggttagggtatgacctgtcagaattccacggttccagtcaggacggtacgcaggattttagcgcggaagaattgcgcaagatggaaaagaaaatccatgaatccggcgaaatgacgaagctgattatgcaaaaggtcgtggagcgtgcgaaaacccgaaacggagttctgataacttgcgctggacagcggcattgcaaggaggcggcgagctatctaccgccggacgcaacatacgcgatcatcaccgaaaagacgaactcaaagaaacgcggcgaaattttggataaggcgaatcgcggggagattaaatacatcttccaggtgatggccctaaccactggcgttaacgttccgttttgggatttttcggtgatattgcgcaagatcggatcgcttacgttgcttattcagcttttggggcgaggtatgcggcttctaaaggactggcaaaaacagcctccttactcgtgggtgaaagaagatcaccttgtctgggattttgccggaacaatggatgaccttggccagttgtatttcgatccgattttggagcaggcgcaataccaaagacgcaagagcagcaagaacggccccaaaatttgcccggtatgcaagggagaaaatagcgagtacgcccgccgatgcatccacaaagacagcaacggcaatcgttgcgaatatttctggatatcgcagcgctgcgaagaccagaaagacccgcgaacagggaagattaaggtaaaaggttgttacgccgaaaacgatattgttgcccgccagtgcagatgttgtggggtgcagcttaaagatcccaacgacaatctcaccgggaagcattatacgcagaatgactggtatgatgttgtcgggttcgatatcggcttgactcgcaatcagtccgggatcatcttcaattacgtgttactgaaccatgacggcgagcggttcaccgccagggaaaagttcttcccggaatcagagaatcagatttgcggcaagttgtggcggcaaaaggcagtctcccagcacgttgacgacgcggtaatgcgtggcaagttgggcggtatgaaaaacgcccgcaagatcctggagtatgcggaatacttccgcgcaccgaagcgcgtaacgcatcgcatcaacggcaagaaggaagatattatttcacgcaaagattttggagacgcagaatgatcgcagataaaggtgattatctcgaatactacggcgggcctgtgaaggcttgtccgcttgagaaaatcgatcagatgaatagcgtttcgtggctgcggcacgaataccctgattatctgttctggcacacagtcaatgaaggcagcaagcacaaggcgagcgcggttatcgatcatcaaatgggattgcttaaaggcgttagcgacttcgttatcctgattggtttcggtggcaaatacccgttcgcagccattgagctaaagcgccagggtaaggcgcaggcgtcgccagtgagcaaggagcaaagggaattccttgctgccgcccggcgtcgcggcggattcgccgccgtggcctatggcttcgagcaattcaagattgctttctgcgatgccataaaatagcactttttgttaaaaccgcccggcgaaagccgggtatcatttccacatcgaaacgaagaatggagtgttgaaaatgaaaaagatgctggctttagttgttctgtctcttggtcttattggttgcagcgaaaaaccgaaaacatatgattgcggtggtgaagcgtttgaggtaactagcaactatatgaaagttgtcaagggtgaaaactctggcgttataattgatggcgctggcgaaaatcaatataaactgcttactccttttgggtacgctcattatgcagtcaacaaaaacactattgatgttagcgtgggcgcttttcacaataccttaacctgcgaggttaaataataatggcaaaagatatcgcagacaaagacactcatgacgcattcatcacgtttgagcaattggagcgcgaaacgtttattggcaacgcccttgccactggcggacactatcaagccgtcaggccagataagttctatcaggtaactggcaaccgatacgcaggtagtaaaacgccggatattgtgcgcgacaagtgggcgacagatcgaagtctgatcgcatacatggaagagcgttacggcaattacgatcttgatgtcgccgcagaccgaagcaacgcagtttgcccgaagttctacgacgaaaaaacggattgccttaaacgctggtgggggaaaaacaagcacatttggctgaatcctccttactcgtttccagatccgtttattctcaaggccattgagcaaatggagcacgacaaccagatcgacattctgctacccggcgacaattctactgcctggttccgtgacgcgcagaagatggccgccgaaattatctggattgttgccgatgttgaagaggatgattacgggaacaagttaagtcgatccggtcgcctcgccttcatcaatggattaagcgggaatccagtcgacaacaacaataagggaagtgttattttcatcatgcgcaagctcaagccgggagaggagcaaaagacactttacattccggtaagcgagatttgcccgtcattagctaaaaagcgtatgcgcaaacgtgggatctgaaaaatggaacagacagagtctttcgccgagtatcttcggatcgttgttgaacttctggacaagcacggcttcattgggacggatgaggaaaagttagcctttgctgacaccatcgacggaacctacatggagttcatggacaacggaaccccggtcgctgactggccagaaattcttgaacgagaattgattgagtttaaatcacatgaaggcgcggagtatttcgcaaaacagcactaattgctaaacaatacccgccgcgtgcgggtattattactccaccaaccaatcaggagcaaacgccatgaaaaccaaaaccattgcagacaccatcaagatcgtaccagtaaaagcgcaagtggtatcgcgtcaactggttaacctgtctcgcctgtgcatggccgactacatggcgaacccttcagataattgccttgatggtgtagtcggtgagatttattttcgcgctggttatggactggaaagcgtggccatgtatgagcaaatggccgaaggtttttgcatttacggtgacgaatgatgattgtcgagactggtcgcgctgccgtatggcagcacgcaaaagaagcgggaataagtgatgatatcgtgaagatctcaaagtatttcgatatcaaagatatatcaattatctttggtgggaagctcacctatctaaacgagcgcccggtgaagcgcacgcgaatagcagtggcaacgcgtgcggaggccgacgcgctgaagatgttcatacatgagtcgaaacagcagaaaaaatattacaagtagcgggggcgtgaagaatgcgatatattgcgatcctatttacggcgatcctgttcacgatcgcaatcatgaactgcgcaattcaattaggataaattatgttaccgaaaatcacagacgaagaattcttagccgcccgcgaggaaggtaagacctaccgcgagatcgcggaagagttcggcatgaacattcgaagcgttgaacgtcgtggcgttcgcctggcacgacaaggacacctacacggaaacgcccacgtttcgaagcatatcccggacggcttcggcgtcaaaggcacgtcgacgatgattcgcgcggacggctccgaggtcgttcggtgggtcaagtcggaagtagacagagatcgcatggtcgcgcttatggaggcggcgcaggcggctttctgcgaagaccttccgcgagctgaaccgcaaccgctggatgagtcgaagttctacattgaagatcagcttgccctgtacccaatcttcgacctgcatattggggctatggcgcataagcatgaatgcggcgagaactatgataccagcacggcagagaaggttctaaaccgcttctttgattattccgtgtcggtggctccgcaatccaaaaaggctgttttgctggttggcggtgacttccttcacagcgacggcctggacgcagtaaccccggcaagtggtcacgttctcgatcaggacagccgatacgcaaaacttgtttatgttgccatccgctcgctgcgtcgcgccgtgtcgctactgcttaacaatcatgccgaagttgaagtgcaggtaatcgaaggcaaccacgaccaggccgggatgatttggctacgcgcagcgctggcggcgttctatgagaatgaaccgcgcgtttttgttgatgttagccctgcgatcctgcatcgcaccttgtggggcaaaaccatgctgggctacacgcatggccacacgatgaagaagcctgaaacgcgccttgctgcgatggctaccgacttccgcaaggagttcggccagtgcgactacatttacacgcattccggccactggcatcaccagactgtaacggaacactcgttaggtattgacgaggtgcatggccagttaggggccaaagacgcttacgccgctcgcggtggttggcgctcctatcgccaggcggcggttattctgtacagcaaagaatatggcgaagtaggccgctttatctaccgcccgaacatgtaaccacaacggccccgcgaggggccaacaaggaaaaccgatgaatagaaatatctgcattttcgatctcgatggcacgttgtccaatggcaaccaccgcttgcacctgctgccgaaaaaggatctccaccttacagaaagttggagtgaatttaatggtgcatcaattggcgacagcccaatccaaagcacaattgatgtagcgaatgcgcttcatcgctccgggatgattgtcgttatcctgaccgggcgatccgatgaggtgaagaccgaaacaatgatttggcttgaccgttacggggtgaaatatgacaggctcatcatgcgtcgcgccagcgacaaccgtaaagacacggtaatcaaggaggaggagttacgcaaaatcggaattgatcgcattgttgcggcatgggatgattcacccaatgttattgcgcacttgcgcggcctgggtattacgacttaccaggtctgcgactacggagacaatcttcaagatcatttaaaatcgcacggagtagacaaatgaaaaatgtaattattctcaacggagcacccggaatcggaaaagataccatcgcggaaattatctcgcggaagtgggaatacaagaaccttagcttcaaacagcctatgtttgccatcgcgcgtgctgtgcttggatctactgattttgcacgctttaccgccagataccacgaccgcaagcacaaagaagtgaaatgcgattttttgggcgaccgttctccgcgtgaattcatgattcacattagcgaaaacttcgtcaagccgaccctgggcaaaaatcagttcggcaagttgctttgcgattcagcgctaacttcgccgtttaactgcatcgtcagcgacggcggttttgatgaggaggtcgagcacgtcgcagcgcatgaggcgcttaacgtatttgtcgtccgccttcatcgtgacggcatgacctttgagggtgatagccgcaaacacattcgacgacccgatctgatttgtgacacgtatcacgaacttgattttgatatgaccactggcgagcctgaagacgacgcgcaaaaaatccttgatatggtttcagatgttgcattaaaattataaagttaatgcctttattatcaccaccttaacgattgggaaccttgacgggttcccttttttttgttcttaattttgccaaatgaatatatcatcaccttaccatttaactaacagaggttgcatatcatgcgggaattcatcaacgcggcaaccaatagcagcggcggtgttgcccttgcgggatctgcatccgggcaattaatcattgctgccattggtttatttttcatgatcttatttggctcaatcggcacgtggctgaagtggaaagactcaaaagccatccgggaggcgattgattctggcgacattaaagaggcattgaggatcaggagcaaataaaatgggaatgaaaacgcggcttactttcgcggcggcggtggcgatcgcggtcgcgttcctccccgaagtggaggacactaaatacacggtttatacggatatcgctggcgtaccaactgtatgcgaaggaatcacaggcccggacgttatcaaggggaaaacctatacccggtcagagtgcgacgcgcttttaaccaagcatatccaggtagcaaagcgaaccgttgacagcaaaatcaaagtagatgttcctgacaccttcagggcgtcgatgtacagcttcacgttcaacgctggcggcggcgcatattctggcagcaccatgctgaaattaacgaaccagggccgattgcgcgaggcgtgcgagcagctatatcgctggacgtactaccgcaacccgaaaacgggtaagatggagaagtcaaaaggcttgcataatcgccgggttcaggaatatcaactatgcattaaggatctaaaatgattaaggtaattggtgtggctcttacggttgttcttctgtctggttgcgcttccagtgtcccgatcctttccgatctggtgggcagcaagccggatatgacggcgcaagtaggcgcggagaacgttaaacaggcggttggcgtgacgaacaaaacggacacgtcaagcaagcaggagactacgttcaaagagtcggcggtaggaaaggttgacacgtcgaacaaaaaatccgtaacgacctccagcattcacgccaaccagatcacggcggacaagatcgagatccgaaacgatgaaagcggaagcctgactccgtggctgattggtggtgttggggttgtaatgctggcgataggtgcgttcggtctttggcgggaacgaaaaaacaaaggggcgtaatgcccctttttctatatgtaccgcttgacgtgcaatagcgctactccgtcttcatcgttaagaccatgttcaaccgtgttggttgcagccattccttgatagagcaagatgagcgcggcacgcaagtaattttctggtgtgatctgtttcacacaaacaagcctgtgaacttccgttatcagatcttccacctggtttcccgaaaagctgttcatcactgagttggtcaaggtgcatcatctcccatatgtatcggttatccatcccttcgaacgaccggaaatcaaaacctatttccctgttatccggccccgtacaccacacagagccgttttttccgtcaaggtatccattcgtatagcttcgcgctaaaaactccttagagaccattgaggcgaacatacgttgcgatacgttggcggcttttgccagtcgaggcgcttcgcggtgcgtatagacgaacttcgcaaaatcctgccgggtgaactcccggcgagattcgcagaacttgtaaatgtcaagaataaacatcaattacctcatgaacgacgggttgataaagacttcggaatccatcacgcagataaagcctaattcctccatcttcggcaataagcgttccttaatctttttgctcaccccggcctggcctttgaagatcttcaggttgcggcaggcgttataaatgccctggacggtcataacaccttttgcctgtttgcagcgactggcgataacgtcatacatcgctttaatttccgctccctcaccagcaaagccggaagagtcagccgacgacaaatacgttttgctcaattcatggaacataatgatcgcttcgtcaatggtcgccgtgtcgatcttcttcgagcgcttcccgccgggttgccagttccggatcgtgtgaatcacggacgccagacgcataacctgcttatcaaacttacccatcgcgccgcgaagcattgtatgcgaatacttgccgccgtcgcctaactccggttctaactcctggcgggccttgttcagcctacgcattgccgcgtcagtaacctgcaacttaatgttcgactcgctcataatgtcatgaatcagccggaagtaatccgccttcagtgactggtcgatcggctcataggtcgaattcccgttttcgtcgatgaacacgcgttcacccaaacgggtttgctcacgaaccaaaaggaagcgttcagataccccgatcccgcgagagccggcctgcataatggcgtcgatggtttcatcctgggcaattacgcaaatgcagcccaaagcctcgaatgacatattgttgctaacgtcggcacgagcgatcgatacgtggcctttatcccatgctttgagcaccagttcgctgttcgtcttcttaccgccatcgtttccatacgtgatccctaaaaggctgttaaccgccgtcgcctcatcggaaataacggcaaagtttccctgtcggttgttaatcttcgccagaccttccggggtggtatcagataccgggaaagttaggtcacacaatttttctaacttctcctcaagttcgtcacggtcttcaaaaagtttcaccatatcagattgcgataactccccttttagcgcctgcttgttggcggacagcttcgccatgattttcttacgctctttctttcgagactcgttaatgcgttcgacttcggcgacaataggatcgatggcaagcgagttaatggcagacttaccagcggaaggcggctgcgacgtgataacgtaaagcgttgtcggttgctcgctgccgtggtactcgacccaaaagcggcccatcatcgcggcggatacggttccgagaaagtgcatgtaagcggatgattccgggaactgaacagaacgcgctgcatttagcgccagcttgccgacaacatcataatcattggcgatcgagattgttggatacttatccgcgtttacgtcgatatctttgggctttggccagaatgaaacggagtcacgatacccgttcgcacgaatcgcaacgcgcaggggactgatcccctccctttctgcgatggcgataatatcttgcggtgatacgcggtcatttaaaaacatgcccttgctcctgattggttaatcgttcggctaatcatatgccgtattaaatccgagatccagtgataatctaaacacgcttgaaaaacgcgcttggattatcggggcgcatggccccgaacccgtcacaggtatttagcttcgaaagtcgttccgtccgatacactgaagccaacttcctcgcggtacagcgtccagcggcatccatcacgatcgaagatgtatccggcaaccgcgccgagcgcacgaccgctttctacctggtagcgcttgccgacgctgaaggattttttcatcgggttgctatggtcaaggccgacgcattttagcgttttggtttttagttcgatgaacgtcgcaatcacctggccaccagcgccagcaataaacaactcgccgctaacgcctaccgacaaaataacgcgcttcttcttcagttcgacgctgtcatataccatcattgacacattgccttcatcgtcgacgcgggcgggataaaggttattttcgtgtatattaatagcgcggcttgacgtgcatttaatcttgattgacttcgccatttattttctttctccgatctcgatgtacaggtttaccaaatccagaaagtcagccttgcttttgcaacccaacttaaagccaacgtgcgactcaattttattttgcatcgcagccagtgttgcgccgccattattcatcctgagaacttcgcggcatacttcggcgagcttttgagatatcatttcttcaccacctttatttccatgccttcgcaagcgctcttgatatcattaatcagacgattaagccttaaatcagtcattacatggtgatgacgtatatcaataattccagcaacgactaacagcatgacggcaaagataaaaccaccaggcccggacatacacaaaacagttaacatcatcaagataataaatttcatttccgttttactccgttgcgtttcgatggggtgattctacccgactttcgccgggtagttttagaaattcgtgctattctcgataattcgcctggaacacggcgcgggcaaaacctcgcggagtaatggaacgcagcattttagtcctttctgaccttccacccaaaaacttccaggcccaaaagaaattcacgccttctactccatccggcggcgtgagccgtttcggttcgacaaaaccgtttccgtgccatatgcacgttttcttcgtgtaattgtcacagtggggcattttgggatgccacacaggctcgttcggagaaacatagccaccgaagtcgcgcggatggaaataaaaatccggctttcgccatagtgacgataatttcccgaccgggttttcgaccatccaggggcaaccatacttattgcctaattgctcgaccatcttcgcatcccctgctgcggataatacgtcattatcttcccttacgtgcttgattccgctatgcgctaacagcgtgcatggcgggaaagcgaaaatgaagtcaggatctggaatgccgagaatcgatcgcttaacgtcaaaatccttgtcaatccaaatgttaacatactggatatttgggtgaaccattcgaatgctatattctccgtggtcgccggagtcggcgttgaaacagtacaccttgcatcccttgatggcccacggcaggcccatgatgccggagccgtcgaacatgcagtaaataaccttttctttcatgctttccacgcctcaatgaacattctgttcgattccagcgtcagcgtgacgccagccagggaggactgaatgagacgaccgcccggaaccgtcccgatgatgtagcggcctttcgacttcgtgatcgtgatctgagtgaagccggaggcgcggttcatgcggagaacgacgcggccatgagcgttcaggacggcgagaatggaatcagtcttcggatggttcattgtgtagctccttcgtttgttggtatggggacagtatgccactatcccgctgtgttgttttagcaaaacgtgctattccggaacgcaggtcgcgtaatcctggctgatgtagatcgtgcgctgaacgcgaggttcgagatcaccgagttcctggatggtaacatcgttgcttcctacccggcacggaaccgatccgaaaataaactcgccagtctgcttgtcgttgatttgccatacattaccgccttcctttttgacaaccaggaaaggcgcactgtctgcactgaactcttccgggccacgaccgtagtaatgcgtgatcgcagctttggccgcagcgctgaaggcatcggtaacgtcattggtcgccttgtctcggatggccttgatacgttcttcaggcgatccgatgatgtaggaaaagctgttcgaaatggtaactgttcgcattatattttaacctcgttttggtggatgaagtcggcgacgtaatggcattcgatcgggttctcgatacccgccagcacctcgcaagacccgttattcagtagctggcaatgctggcactccgcaccgccaacactggcaatgacaatggcgatcccgttgcatgaaccgccgaacattcgatgagggaagtggtaagcatcgcaggtgcaaaccacctccccggcccgccgtttcctcatacctggcccttctcgatgcagaaaacccaatcacgagcgtcaaccgcaaagcgtgcaacgccgtcgagcaccacgaagacagtaaacccgttgacgccgcgacccttctcgatatcggtcacggtgcggaacagatcgcttgcgccatattgaattttatccccgacgactacatccgcaaatgctttcatggttaatctcctgactggtttcgatgggttaactataccaggcctcgcggcccggcgtttagcaattcgtgcttatttcactgctttcttcgctgccttgtacgcctctttgaaagccggaacatcttcgaccggaatccagaagccggagccatagccatcgtcatagcaagggcattggtcgcagtagtcgccccaggttttctcttctccgccgacagagaatccagtgggcattttgcataacgcttcctcaaccgcttcgatcttgtcggcgtcgctatccatgataacgaagttccacttgccgttatactcgctgcccaggttgattgattcgcgttgaagtttcatagctttagcccctttggctcaattcgtttcgttgaagtcatcatagcaaagccgatcggatggattttaacaaaaaatgctattcctgcgattgctgattattccaccgattcggaatagtggaatagatggtgattgcacctgattccctggtgattagttttgacgaatcatgattgcttttgattgtttcattttgtgcaacgattttgtgagtgtttcaggatttgcaacgaattgcataaatgtatgcaccatgcacgcaatttgccgatcgaagccagcaaaagcgccaggtgtttttcgccaacatttacgtcgtgtggaaatgtgggggaggaataatcttacctaaaaattgcgcaaaaagtgaccaacataagcctataatagatatataagtatatgataaataataatattattattattactctttatctatatatatgtttggtaagatttcttcggggaggttatggattcctcttgcgcaagccatagtttttagatgttccgccgcgaaaaaatgtatatagggatatataggggatgacagcaaatcttaccaaacacgcttaaacccttttacggcaaggcttgcgggtggtaagatgacattcccacacaagcaaaaacgacgtaaatgttggagaaaaacacatgcaatataaaggctatgagttcgaagaagtcgacgtgtccgagtggatgcagtacgacgcagataagcaggcagcttaccatgaatggctgcaatccatcacgtttggcggctcaccaggggtagacgatcggccagttgctgaaaagtcacccgccgcattcactggtaatcgttcgtccgagatccggcgcatgttcctggatggcgggcgacgtatccagatgacggcggaggagttcgcggataagttcggcgttcatccggtcgacaaccatttccgcaggccgttgctgaaactcctggagccgggagaagtgttgcgggtgagcctgggggcggggttgatctccgtctttaccgagttcgacgcaatgactggctcaaacatggaggctgaggcatacaggcggcagggcgctatctccgagagggaaaggattaagggtttagtggccgctcttgctgtagactttgccggacatgccctggccgggatttacaaggcgaacttgttcgcggctatcgatcttggattgaccgccagcgatatcagccaggaagcggccaccacgcaatagcactttttgttaaaacccggtcagagcgatcgggtattgtctttccatcgacaacgaaccgaggaaaacgaaatggtcactcttatcacatgggaacacgaaaacagcgagccagtggtgcgcgaattcgagaccgtagcggcatgttacaacctggcggcaaatggtggcttttacaaggcgcagatcgttaacgagttcggggttgttgattatgaattttaaggcgagcgacgtaaaacctggcgtggtctacggatcgcgcctcaataaccgcctttggcggtgggacggcgaaactatgtggactaaaggcgagggcgatgttatctggcatgaatgcggctggccataccccaccatgagccgcctcgatatcgcttattatctttcggttggcgatatgcacgagatggaagatagcactttttgctaaaacactgctgtcgagatccggtattatttattcatcgacaacaaagaggagatgaaaatgagcaagaagaatccatattcaaccagcaactaccataacgaacacgtcatgcgctggcactggcagaaactcaaagaacgccaccttgcacgccatggcaaataatcacaatagcgccgcttcggtggcgctgtatcccaaccataaaaacggcttacaccaggaggattggccatgccacgattttcagcaacaacaaaacttcgcaccttcgccgggatgccgatcccatactcatcaaccaaagccgtccagggcagcgagcacggcgtatacttccactggtgcggcaagtggcgcttcaccgtcattcgcggcttttacgtgacctgcgaccacgtggatattaccgactattccggcggaaaccaggttcatgagttcaataggcacgaatagcactttttgctaaaactcgatcggggcaatgcgttattattaccccatcgaaacagaggagcaaaaaacatgattggcaaccacaacaacgaactgaacgcagcagcccaccgtcgcgccgtcgagcagaacttcaacgcgcttaaagtagcctgcgatgagatgaaagcaatgcttgaactgccgtcatgggatccccaactcgaagactattacgacggcctccgcgtcaagcgtgacgatatcatcaaccgcctgcgcctggctggaatgtttctgtaaggagaacgcaatgattcacgaaattaagtctggaaaacaagtagtggccaccatcacgcagcgccacgttgtagcatttcagtttaacatccccggcaccaacgatatgcagtctcttgacgtgccagtttgggctaacacgatcgccattgatgccgacggctcgatttgggcctacgagtcgaccgccgaggatgtttgcatcccggactactcgcgcaaagcctgggtggattgtgggccttccgaaaacaagatgcggtcagtaggggagatggatcgcttccatgattgggcagaatcgaagattgaccttcgcggcctgaaatagcacgcattgctaaacgcccggtcaagggatcgggcataatcatcacgaagtctattaacaaaccgattatgcaaggagacagaagaatgcaacaatttgaatctcgcggcaagacatacaacctgccggacactgctacccatgccgcccctggtgcgtgcggcggcctgtattttaaggatggcgatagttggtttttcatgggggatgtggttgggggtgtaccgacgaagacaggcagcttactcgtgggcttctacgatcacgacttggtggagttgaagccaaagcgcgtaccgttcgctttctggaaaaaaatcaaaggggcgatctttaaatgaatcaattcgaattcctggcgcgtgcgcaccgtgcgcttgcaatgtacgccttcagcaagaacatgaagattatcagtgttgaggttgagttcaacaatatcagcatttccggctacgttggcgactcataccacgtgacgaaattcagcttcccatcgctggcttgcctggagcgtgaggcattcggtttctgaatagcactttttgctaaatgcccggtcagcagatcgggcataatggccacacaccaaacaacggagattcaccatgattcgcactaccagaccactacccaataacctttacgccacgattggggttcgcgcggtgagacttattcacatcaacgaagttggcaacgtggctattttgtggtttaagcgccactcaagcggtgttggcctgagcattcaaagattcgggcgctttaacggcaactcccaaacccattctcattgggttgatggctcatactgctggacgcacgttaagcacgtcgagaacttcgacgccaaatcactgagcgacgacgacgcctggaagatggtaacagacctcttcggttatgatgcctgcatggaggtagttggatgatacgtttatcagacttcgatcgccactgcttaaccgggcaatttggcgaaaagccagtaatgtgcaagatctcgaaggtaaaaggcgaccccgtcgagcaggtcaatacgcttaaaggcctggcaatgcgcaaccgactttacatccatgtgcgcggcagactgttcgcacagcaggttcatttttcgcatgggacgtggttctacactggcggggacggggttggcccatcgcagaaaagggttatgctgcgcgagataatcgaacacggttacgtttggactaacgggatctactaatggaaacggtaaaagtaatttgcacgcacgctggctattcgccgctatccacctatttcacgcctggccgcgagtatgacgccatgttcggccccggccttgatgaagtgtggattttgcaggacgaccagaacaccacggaagacgaagaattttggccagcctgccgcatgccggacgaaaagatcgccatgtacgccaataggccatacgaaaacaacgttttgtttgaggtgaaagtatgaaagtaagcaaaaagaaactcgcgctgtattgggccttcttcctggctggccttgccctgcataacagcgtgggctggcagacgatcggaatgctgtgcatgattattggtgtatgccgactgtctgagattaacgggttccgccgtggatatcgggcagcattcagcggcgaaaaagaatagcactttttgttaaaactgccgtaacgtcatttgataaagtggcgttactgaagtgaaacaatccaatcaggagcaacgcaatgaacgataatttaatcgcactgctggaagaactgaattcctacggctgtgcatacatcgagctttctagcgaacacgttatcgaagtcattattgacgatgacgcagggttcaccaagttaagggtggctaccggggccgaagaggaattcgaagactgcggcatccgtgaagtaaccaaccttctcgaagttcaccaggtgaaggagatccgctaatgaaaaccgtcaaactaatggttgtcaatgcggcccgcgaacgtgaacgccaccttatcggctgcgtattcgatgccgtcgaggtaaaagactcaaaaggagactttcacgtaatacagggcggataccttaacgaatttatcgtcaatccgctggatactgacgaagatttgaccatccgtgttggtagcgagccggaaaacgcgcttttccacctgcgtaaagtatcgaaggcatcgcagcgcaagttgctggttcgcgcactgaagcgcatagcgaagcagcgcggctacaccgatgcatacatccgcaagttcggcacgttcgctggagtaggtgattgggcgcggtcatgggccgacttttatttcaacaaatccggcgaattttgttcagcgcatacggactggctgcatggcacggaacacgatccagttaacggccacgagtggtacgaattcattgaggcggaattagacgccctttgatagcacgaattgctaaaacgaacgtccggggatggtgcatactatccccacactaacgaacaaaggaaattacccatgaacaaaccaaaaatcatcctgatcccgtccgtcgattccgtggttaatacttatgctaaattcaccaaaggcaagcgctataccgcaaccgcatttaccaaatgttccggcgaaatgctgtacaaggtcagcgatgactacgggcgcgagtatcacgtaaacccaagatcttcgcactatcttggtggccatcgcttcgatattgagtacccgatcgaagattgcagtaagcgcgactcgttcacctacgatgacagccgttctatcgccattcgcgctgcaaccatcggggacgggtttattagccgggcctgcatcgttgatctgatcccgtccgataatcacgccaaagacgacgccgacacgctgttaaatgccgtcgttcgcgccggaatcggcttggagttaagtgatgcgtcgtgcgaatcattcatgcgtgaaccgttctcacgaatcgcggagcttgaaaagcaagttgcgttcctgactggtgaacttcaggccgcaaacagcaagatcgagaatgttcgcaaaatcatgcgtagcaagcctggccatgacattgaagattacgcgcgggttttgcgcatgatggccgacgcattcgccaaactttagcagtagcacgaattgctaaaacagatcaggggtaagctggtatagttaccccatcgaaacgaaacggagttacagcaatgaaaatcaaaatcaccaaaatcaacactcttaacggcgacggctcaattaccctggaagaatgcggcctcaaaatcggcgaagttcttgaggtcgacggccacttcaacgacggctcatactgtgtgatcgctccgcgcaatagcgagtttatccaggctggtgacaatatcagcgtaagcgcagacgaatgcgaggttgtggaagaatgagcaacaaatttgggtactgacttacaccattggaaccaacgaggggcgcaaatcgcgccgcctcatctgcgacaccaaagagcgggcgattaggcagcaaaccgttcttggtggcgaacttgtcgagtatctccgcaagcctgaagcgttcaaggtgaactggccggaaggcatggatatcaacggcgctttagcgagcctgcgtgaattgcagaacaacccgaagacgtggagcgactttcaatgcctgcgggcggagccggaagtgaaggccgaccagttcaccaatgttcggtcgcagcacgcggagtggtcggatcgccagttcggcgacgttgggccagtcgggccgctcaaacacctggcgaaagaggcgatcgaggccgccgaagcgccggatgacattagcgagttcgctgatatcctcatgctggtatgggacgcaacgcgccgcgccggattcagcgatgagcagttggctgaagcggtggcggaaaagctggaacggaacaagcgccgggcgtggggcgaggtcaaagatggcgagccttgccaccacgtaaaaaattaacgaaatcgaatgccgtttaaagcgcctgtaagccattctggctggcgcaaatttaaggagtacgattgtatgcctgaatactcgaaagtcgaagatatgccgattggtgcaacaattactggtatccgcatgagcgagtcggacgacgccatcaagccgctggcgttcccggttacgcaggtggagacggacagcagaaaagggttcatcttcatctacaaaaatttcaatagtccgctgcgggttgaagtattcatcgctcgcggaacctgggtagaatgggagaaggccaaatgttcggactgaatgaagcgcagtacaacgccgtaaagcgcatagcaaagcagatggccgcagaaacaaaagacgccatcaagaaggacaagaagacctacgatcaggtcgccgcgaagatgatcgataaacattgggcgcaaatcaacacgctggttactcgcggccagtttatatggatagctggctacctggaaggccgattcggtcgaagggatggcgagtatgaataaaaaacagccaaacgattcagtgacctattgacgcaatcgcgctgatcgggtaacgtgaaccatgtagacacaagaggcggtaaacatccgcaagcctggccccggttaggggcgtttacataggagttatgatgcaatataaaatcatgctcacagcaagaaaaatgggtggcttttgcaaatcctgcattcaagagttcagcatgactattgaggcgaacgacaccgccgacgcggtagagaaagcaaaaaagcaatccggcgtaaatctggatacgcataaaatcaacatcaactacataagggaaatcagatgatgctaactgtgattattgctcttttaatgctttttataggttatcacgtcggagcggctcaccttgtagagcgactttcaaagcgggtacatgaaggcacctttgctgccatgatgtacaataagaaaacggcacgttgggaaaaaattggcgatccggatggtatcgcaaaacgaattgctttttcgccgcttccgtatgttgactgtgagctatttgtgaaactacagaagacgctgaatcggcgaaacaaactgatatgacaaaagaacccgcttcggcgggtttttttatgcccgcgatctgatatactcgcaaatcaacacagaaggaggattacaa

SEQ ID NO: 244 - DNA, 49443 bp, synthetic construct
  source 1..49443: mol_type = other DNA
atgtctgaagaacgtagaaaacgcgtaacgaaatcgcactttgcaggcaactttaaagcgctatatgaaaaggagttcggcgtggtgctagggcgcacggcagagatgacgccggaacaattttttgatatcgcaaagcgttacttccagtgggccgaagataacgcaatcaaggctgcggagacggcaacgtttcagggcgacgttaacgagtggggagtgaacaagcctcgaatttttacgctaacagggttaagcctgttttgcggcgtgaaccagtcaacgcttacacgctatcgccacgatcctaactatgctcccgtcatggagttcatcgactccgtgatctatgagcagaaatttcagcttgctgccgtcggcatgattaacgcttctttcgtcggaaaagagatggggatcgataagccaccagtgctgaacatcgacgctatcgccggggataagaacgagatcaccgaagagaggttagagaaggcagtgaccaatattcttgataagctgtaagggtcagatatgaacgaaatgatcatttgggaagacctgtcgccagccgataagctggcaattaaggcgcttagtacgcgcaacttttcgctattcatgaagatctggtttcagatcatccagggagaaaagctgatgtggaactggcatcactcctacttttgccacacggttgatgaaattatcgccgggaagcgcaagagcacgatcgttaacgttgcgccaggctccacaaagacggaggcgttctcaatccacctcgcgccgtatgcgtatcttaaatgccggaaggttcgaaaccttcagatctcgcagggtgacgcgctgtcaaaaggcaactccgatcgcgtgattaagatcttctcatctaacgagtggcaggagctatggccatcaaagttcgggcgcaagcagatcgatgaatttcaggtcatggacgataacgaccgcgtaaggctggaaatggtctcccgttcgtccggcggtcagatcgtcggtaagcgtggcgggtacatgacgccaggtttcagcggccttatcgcgctggatgatatcgacaaaccggatgatatgttctcgaaggtgaagcgtgagaaaaaccacgtactcctgaagaacaccattcgatcccgtcgagcgaagaagaagaaaggagacgaaacgccgatcctttccgtgcagcagcgattgcacgcgcaggattccacctggttcatgatgagcggcggcatggccatcgacttcgatcggattgttatcccggcgatggtaacgcgggaatatggcgaatcactccctgactggttgcgacctgagttcgagcgcgacgtgctttccggcccgtcggtggtaattgacggcgtggaatactggtcattttgggaggaaaacgaatcgatcgagaacctggttgcgctacgcgaagccgatctttatacgttcctttcgcagtatcagcaggaaccgatcgccctgggtggcaacgtgttcaagtcggagtggtggcgctattacggcgattccgacaaggcgcacgagccgcgcccggacaagttcgaatatacgttcatcacggcggacaccgcgcagaaggtcaaggagctaaacgactactctgtaatgtgctattggggcaagtatcgggatcgcgtctacttcattgacggaattcgcggaaaatgggaagcgccagatctccgcgttcaggccgaagcattcatcaagcagtgctggcgtcggaacaaggagtgcggaaaccttcgccggatctacatcgaagacaaggcgagcggtacaggtctaatccaggatttaacgaaggcggtaaacggcatgggcgagatcgtcccggtgcagcgcgataaagataaggtcactcgcgctatggatgcacaaccaatcatcaagggtgggcgtgtcgtgctgccggacaatcacccattcgttgcagagcttgaggcggagatgagcgcgtttacatatgacgattctcatccacacgatgatatttgcgacaacgtgtttgacgccgcaaacctggaaatgaacctgagcgacgatccggtagagcgaatgaaacgccttgcgggattgaaaaagctgggtcgctaatacataatgtgggcctgacggcccacacttaaacaaggttgaaatatgaataacattaagatggacgactataatcaaatctttaatggtggcgctggttatgcgtcaaccctcgcgtctatcgcggcaagatttggaacaatgtcgcaggttgaagagttctatcatgaaaacggcatggcgaagaaaatcgttgacgtgatcccggaagagatggtcgctcccggcttccagctaaacggcatttcagataacaccaagtttcaatctgaatgggacgggttaaatctggagccgcaaatcaccgatgctctttgctgggctaggctgtatggtggctcctacgtcctggcgatggttaacgatggtcgcgcattgacttcggcagcgaagcggggtaagccactcgaatctatcgttgtttacgaccatgattccgtttccgtcgcagaggaggaaaccagtccgcgaagcccacgattcggaaagcctaaaatgtacgaggtgaagccgctaaacggcgggcaaccgttcaaggtgcattatacccgtatgcactacatcgacggcgagcgcgtaaccaacaaggtgcgcaagctaaataatggcgctggtggctcggtgctgaacaagtcgattattgaagcgattcttgattacgactattcggaatatctggcgacgcaactactgaagcgcaagcagcagggcgtttggaaggcgaaaggcctggcgctaatctgcgacgacaaagaaggcgagtacgccgcccggttgcgcatggcgcaggttgatgctaattccggcgtcggaaacacgatcggtattgatgcggacgacgaagagtacaccgttatcaactccgatatttcaggcatcccggaattcctttccgcgaaaatggatcggattgtcgccctgtcaggcattcacgagatcgtgctaaaaaacaaaaacactggtggcgtaagtgcaagccagaacacggcgctacagacgttctacaaactggttgaccgcaagcgcaatgacgattacaagccgctgttagaattcctgttacagttcatcgtaacggaggatgaatacagcgtcgagttcgaaccgttgtcgctgcctaccgatgcggagaaagcggatatcttccagaagaacgccaacgcggctcgcagcctcgttaccgaccaggttattgacgccaacgaagcgcgtgatactctgtcggcgttgattcctgaactgaagctaaaaggcaacgctccgaagcagaaaaaacttccggatcgcgccgctggttcaggcagcacgcaaagcgcagagatcttaaacaacacggaggcggatgatgaaagttaacggcagaatcccaaactggcgttatcctgaagcaagcgagcgggagttatcccgctcaatgcaggacgcggtgacagaactcgtggtagaaatgcgggatcgcttagaccgccttaaatttgacgccacggctgaggaaatcagccaggcggaagacgatatcagcgaatctgccatcgtgttcttttccgccgtaattgcggcgctttcctccattgggttgactatctatagattcaattctaaacagtggcttgcaattgcgatcgcggctggcgggcggaacaacgaatcagttatgcgccttaaagaattcggtgctggtgggtatgaagactggtatcaggaatcgctaaataagtggcaggattacgccgaagcgtcaatcaggaagttagcaagcgatatagttgctgactggacaacgaaagttagaaccgccaacaacattggcaagtctcgcaagcagatcgatgaaatcatcgaaggtcgatacgctatctatggtagttggtcgcgcaaccgggcaagcggaatcatcggaacttttaacagtatgttgatgatgcagcgcctaaaagatgctaaagtatcgcattacttttggttcgggatgatggacgaccgcgagcgcgagagccatatcaagctagaaggtaagcgacgccccgttaatggtgacggaatcttccccggcgaagaatacggttgcaggtgctgggcggttccgtcatttgataatgaggatgattgatggttaactttaatgattactttaatcacgtaggaaaggatctgatatggaagcgagcaacatcaaaccgcgtaaaagttggtgatgttgccgggtggaaagatgagcatgggtatgtatacattagattcatgggcaaactgcgacaagctcaccggatcatttgggaaatgcaccacggcccaataccagaaggaatggaaatcgatcatattaaccatgtaacggacgataacaggatcgagaatttaaggcttgtaaccagaaaggaaaactgtaaaaacgtatcaatgagcgtaacaaataagagtggagttgtaggcgtgagttggtgcaagagaacaggtaaatggtttgcatccataagggttgataaaaaagagcgattcttaggtagatacgaagacaaaaacgaagccatttcagcaagaaaggcggcagaggcaaaatacaatttccataaaaatcacggagataaaaaatgaaaagagttcaaaggttcgacacggtaaagatgaaggccagattcgatgagaacggctttctggttgatactccgatcgtggcgcgtatcggtgcgcagacgtaccagacgccaaccgggcagcgcgtcgagttccgcccgcgttcggaggtgttcgatgctgaatcgctggcttcataccagggcaagccgatcactttgggtcacaagatggtgaacgcgcagaacgcaaaaggccttgtcgttggctcgtgctccggcgctggcaaagaagatgggattggtgttcttgttccggtgatgatttacgacggcgagtcaatcgagcaagccaaaaagcgcgtagctgctgagttatcagtgggctacacttcggtcgatatcgatcgcaaaggttggggtaataacgcaactggcgaatattatttcgatgaagaccttccggaaaacttcgaagagatgaaaaatgattccgtctctgattgggttcgctttgatgcagtgcagacgaagattcgcgtgaaccacgtagcgctcgttttccgtgggcgtgccgggattgcgaaattaaatcttgatagcgaacaagaattcccctatgatgacgactcaaaccacaaaggagctaaaacaatgatcattaaaattgacggcgtagatgttgaagtagcagataacgttggcgcttacattgcaaaactcgacgcgcaagttgcatcggcaaccagtcaggtaacgagcatcaccgcagagcgtgacgcacttcagaccaaagttgatggcattgaagatgaagtcgccgcccgcgttgctaaaatcaaagccgacgaagacgcaaagcagaaagttatcgcggttgtttctgccgctggcgtcaagtgtgacggcctggatgttaaggcaatgaaagttgcttacatcaaagaggttgacggtcgtgatctgtctgataaagaagattcgtacatcgacgcttcttttgactttatcgccaactctgataagatggctggcaatcgctccaaagtcttcggcaaaaaagaagatggcgagcaaaaagacaaaggcggcttaccgaaacttgacggcaccgaaatcatcgatccgcaggcaaaattccgccgctaataatttgcggccttcgggccgctaccagaccaaataaacaggagattcaaaatggcacagattccagcttcttattcccgcaagcgtgatattgccgtagcggggcagatcgctgatacgtcgctttataatatcgacggcacttgcgttgctgaaggcgatatcaaggctggcgtactggtggcttccactggcgtagtttccaatggccataaggtcgttaagccagcgaaagcagcgagcgacgtcattgtaggcatcgcgcagttctcgcaagcctactcgcctgaaggcaagtatgacgatgagagcgcggttaacgttatgactcatggccgcatttgggcgatcgcggacgcaactgttactgaagcagattgcgtgtttgattctttcgccacctttaccgcaaacggcaccgtagcgaagggtgatgccggggttatcaaaactggctacaaacacactggcgaatacaccaagaacgcagatggcaccgttctggtgaaagtgcaggtgcttcagggcgccgttgctccagcggctgcaactggcggcgctggcgtataaaataaggggcttcggccccatttttgcaccagaaaaaaacctttgacggcttaacgattcgtgatattcttcatctcgttaagccaaatacacaaacaggagtttttcagatgactatgaaattagatgcattcgaacagagtgcaattaaggtcgcaatgcagggcatgggcgtcgatgccgcaaaactggatgcttacggtatctggactgttaagcagatgactcaattactgaatcgccagtatgagcaggcatacccgcagaccagcgcacttgagcttttcccggtaactaccgagatctcgccgaccgcccgccgctttgagtggctcgaattcgacggcgtaacctctgcgaaaatcatcgccgattacaccgacgatctgccgaccgttgaagcgatggcaaaagagaagtcagggaaagttttccgcctgggtaacgcgtggtttatttccatcgacgaaattaaaactggtgcagcgctgggttcaagcctgagcgatcgaaaagcaaccctggcccgcgaaggtcatgagacgctcgtaaacgatctggtgttcaaaggctccactcctcacggtatcgtgagcattttcgaccagccgaacattaaccgcatgaccgccagtgctgcatggggcaatgattcagcggcggctgaaaaggcattcgaagatctggaagacctgcttaacatgatcgaagaaaccacgctgggccgccatcacgcgaccaacatcgtgattcctccgtctaagcgtcgtcttctgacgaaaaagatgccggacactagcggcgactcttatctgacttggttcaccaagaaccacccgaacatcaccattacggcgatggcggagttggaagatattgacggcgcaggcaccaaaggcgtgctggcatacgaaaaagacccaatgaacatgagcatcgagatccctgagcggttcaacatgctgccgatgcagccgaaagacctgcatttcaaagttccgtgcacctccaaatgcactggtctcatcgtgtaccgcccgctgactattgcgattctcaccgggatttaatcaaaagcgccttcgggcgcttttttattgcattgcattctgcaatgtgctttaatttgaaacctaaagtaaaccaatggagcattaacaatggccagtaaaaaagaaaccgtagaaaccgtagaaaccgcagaaatcaccagcgaagaacagacgccgcaggttgttcaactgcaaaacgttggtgcatgtgcaattcgctataaaggcacaaattacgtctatgagcaggttttcgaagtgccagaaagcgagatcgaccgattccgccacgaaatcttcaaaggccgcgtcgagttctacgacaatcctaaacgcacgcgcgaatacatcgcagcggtaaaggcgacagcgaaagagatcgtgcagcctaaaagcgcggaataacaaaaaccaacaaagggcgcttcggcgtcctttttcatatcaggagagcaaccatgaattacacaattcaagatgtgatcgataaaatgcgcagccttgcacctccgcttaaagaagttccagatgaactgctgtctgcatgggttgtgcttgccgaagaattcgtttgcaaatcccggttcggagactccatcgttacggcgatcgcgttgatgaccatgcatctaatgtttttggacggcgcaatgaagcaggaaggcgaaagcctggaatcttacacgcagcgagtggcgtcgttcaccctgaccggggagttttcccaaaccttcgatcgcgtgtcggcgtcaagtgataacgaaatgctttctacgccgtggggcaaaatgtactggcgtatgctcaagatgcgcggcggcggcttcggcctgcttaccgccgggaacgtgcgccgctgcggaatggttaggtgatcgctatgaactacaaagcaatccaggcacgcgcaagcgctggcattaaattcttcagcgacgctggcggcgtgttcaacaagtacacgaaaggcgctggcggaggaatcgatccggaaaccggggaagatatcattcctggcgaggtggtgacgacaatcaagggagcgatcagggatgttaatgaccgtgacattaacggcgaaaccatccttgctggcgataagcgcggttttttcactcatgatgtgccaatcatggaaggtgacgaaatcgaagtagacggagagcgctaccgcgtggttaatgcccgcccggtaaaaccaacgggaaccgtcgttgcctaccgtccagttttgcgcagggtggcgacttatggctaattacactatccgcgaattcacaggcgcaattgatgcgtggtgtaaggccgctggtgatgcgctggaggacgttgtaaggtttacgtgtgaagatattcaccgcgaccttgtaatgcgttctccggttgatacagggcgcttccgtggtaactggcaaatcacctttaaccgcgccccgctttacgcgattaacgcatacgaccaaactggcgaaaagacaatccagaacggcaaagccaacattgcactatacgcaaaaggggccgggatcacttcgatctggttcagtaacatgctaatctatgcgaacgcgctggaatacggccattcaaagcaggctcccaatggcgttatgggcgttgttgcgatccggttgggcgtttatgttactgaggcaatcaagcgagcgagggcgaaaaatgcattatgatatggcgttaaaatgcaaggcggcagtggctaaatttgccgccgagaacgggttgagggtcgcgggggataacgttgactttatcccaccgagaggcggggaaacctaccttaaagtctcctacgtcgaggcggattcaagatcggttgacctgtcaaggaaatgccgagtctatctggcgatggttcagattgacgttatctttaagcctggaatcggaaccgatcgagcgaggattatcgcccaacgcgttgcaaaatccttccctgaaggaaagattgttgatcgtgacggtaagttatatgtgagcgagtgggcggaggtacacggcgtgcagaagcacgaaacgggttggttcttcccggttcggttcacagtaagatgcgaccgcacggaggagagcggctatccatccaactagcggaacctcacgtcgcttataatttcttgccagcctggaaatatgtaggcataatggcggtgtaaaactttcattcaaacaggagtattcaacatgcatttaccaaacggtgctaaggtcttctttgagaaggctcgcggtgcgaagattccgtttaccgcaatgaccaacgacgcgaaaaacccaaaaatcacggtggcagatggcaagctgaaggtgaaagatattgtgatcttcaccgattgcacctgggacgacttcgttaacaaggtggctcgcgtaaaagcagtgacagcaggcgtggcaacgctggaagagttcgacacctccgacactaacaagtatcctggcggcgcggctactggtaacgtaagcgtgatcactgattgggtggaattgccttgcattcaggatttaggcaaagatggcaacgaacagcagttctataactatcagtgcttgagcgatgagcgcgaacaatccgaacctacttacaagtcggcagtgacgcttaactacacgtttgcgcacgattacagtaacgcgatctaccctgtgttgcgttcagccgacgccagcaagcaggcgagagcgatgtacatgtatatcccgcgagcttccgaggttcgttactggtctggaattgcatctttcgatgacattccttccacggctgttaacgagatggaaacggtaacgcttaacattgcgcttaaaggtgctcacgtcttccttccggttgccgtgtaattaaatggcggggcttgtgcctcgcctttttttgtgcataatagcgaataacacaaaccaatcaggagttaacaaaatggctaaattcaaaattcaaatcggcggcaatctcccttctttcaagctgcctgtaaccttcacttgccccgacggcaaagaagcaaccatcaccatgacagtaaaacatcgttcaaccgatgagatgaaagacttttatgagagcgaagataaagcgccaaagggtaacgccgagtttatccgcttcatggctgaaggttgggatctggatgacgaattcagcgatgaaaacatttcctggctttgcgctcacttcccggcgttcgtcatggcactgccacaaacttacatggccgcgctggcgggccaccgtgcaaaagtttaaggcgggctgtttatctcacgcttcagcctgagctaaccgatcgccagcttgcggagtacgggttaaggcgatcggattatgaagcagatcttgaaacgatctactttgatgaacagaccgcccaaagctggcagctattccaggccatgcaaacgcagtggcgaatcgggatgaatggcccgacggggcttgactataatacgttgcctatgctgttcgaattgtataaaatcgacaatcgagaagcggcattacttgacttgcaaatccttgagggtgaatacctgaaggagatttacaagaaatccaaataagcgcctactggcgcttttttcatatgggggcgaaacatggctgataaagtagctgggctaacgtttggcgttgacgtgtcgcaggttgataaagcggtacgatcactcgcagaactgaaaaaccaaagccagcaaacgggcgctggcctacagtcacttgctgacgctgaaaggcgggccacggcgcagaccgaggaaatgaaccgcgcattgcagcgccagaagcaagagactgacaaatcaaaaaccagctttagcaggatcgcaagcgccatcgatcccacgatcacaaaaatggccaacttgcgcaaagcgacggaagaacttgataaagcgtgggcgcttgggcttgttcctgacaaggaatttttccgcctgggagccatcattgaatccacaaccaacaatctacggcggcagcaggcggcgctaaccgaagaaggtcgcgcagcaatcgcagaggcggaggcaaagcagaaggcggcaaatgccgggcgtgattttgtcgccagcctgaaacagcaggctgactccatcggaaaaacacgcgccgaactgctggaaatgaaggcggcgcaattgggcgtatcggcagaagcggccccgttcattaacgcgctgaaacagcaagagcaggcgttaaagaaacagcaaaacgctatgggcctggctggcatttctgccgggcaatataaaatggccatgcgccagttaccgatgcagatcacggatattgtaacttcccttgcgtcaggtatgccagtctggctggttgcggtgcagcagggcgggcaaatcaaggacagcttcggaggcttgagcaatacgtttaaggtgttgttgagctacatcaacccgctaacggttggtgctgcgtcgttgggtatcgccctggcggcaatcgctaaagctggttatgactcctggagtgcgcaacgagaactggcgaatgcgctggtgctgactggtggctatgctgcgaccacaaccgggcagatcacagccttaaccgaagagattaacaaaaactcatcggccacgattggcagcattcaggaaatcgcaacatcgctcgccagttctggtaagtacaccatcaaccagattaagcagatcacgaagactacggcggaatggtcggcgcagacgggggagagcgagaagacgatcacagggtattttgatgccatcgtaaaagaccctgttaaggggcttgccgatctcaatgagcgttttaattttctgaaagagggccagctaacctacatcgaatctttgcgtaaaacaaaaggcgagacggcagcagcagatgcggcgacaaaactgtttgctgatactatggataagcgccttaaagatatcgcggacagtgcaacgccactcgaaacgatgtggatggatattaaaaaatgggcggctgactcgtggaagtgggtaggcgatcacacggtaggggcgctaaaccttatcgttgacacggtttccgcaatcatcaacacgatcagaaagctgattgccgacggcgacgccatgatcgcgcagttcatcgttgacgctggccgacagctacagaagatccccggcatgggagactttgggaatgactttctggcgcagcaggagcagttaatcaaggactcgaaagccaaatccgccgagcttgcaaaaaccattgcggaacagcaggcaaggatcgcaaaaggcgagatgggttacattgacgccgcgaaggataaaaccctttccggtgggtacagcagcaaaacgaaggatcgcgtaaatcaggaagaaaaagatatcctgaaaaaccgcaacgccaggaagcagcaggtagacgcgggcgttaaaattgatgagcagtatcaggctgaactgctatcgctacaggcgcagttaaaggttttgcagcagcacaaagggcttgatgacaagatcagccagcagcgcaaagactacttcgagacggttgctaaattccaggttttggaagaggcaagccagaagcgaaaactgacccaaagcgaacagcagatgctggcgaacaaaaagaatatcctgtacatggcggagcaaaaggccatcgtgggagatcagattgttcagcagcagagattgaacgccttgcttgacaagtcgaccaagtatcaaaaccagatggcggagaaaaccaaagcgctacaggataccgccggaatgggtagcaaggagcaggagagataccgggccaatgcgcaaatggcggctgactggaaaaacaacggcggatctttaagtgaccctggatttaaagcgatgcaggccgcaagcgataaattctacgcacagcaagatgcgcaaatgatgaactggaaggccgggttcactcatgcgtgggctgatattggcgacgaagttaatgacgtatacaccaacatcggggatatcactaaaaacacatttaacggcatggcgagcgtgctgactgattttgtaatgactggtaaagccagctttagcgactttgcaaagagcgtgatcactgacattaccaacatgcttatcaagatggcgctgtttaactcgctttctgccgcgtttggtggtggcggcacgttcagcttcgccaacatgttcagcaagggattttctggtggtggctacactggcgacggcgggaagtatgaaccaaaaggcgttgttcacggcggggaattcgtattcacgaaggaggctacgcaaaggttaggcccggaaaacctgtaccgactcatgcgcggctatgcaagtggcggcctggttggtggtaacgcaagttccggatctggaatcaccaacggcggcaacgtcgcagcgtcggcggctatggtgttcactatcggtgacattaacattacgatgggttccggtcaggatagtaaggggatggagcagggcgtaaggcagatcgtgaacgatatgttcaccgaggctttgagccaaaacgggcgcattgcgaagttcgtcaatgagaaaacgagggggtagtagtggattcctttaaatggtgtacacaaattcaaggaggggcggcaaaggtagccgtctccaacaacattcgatcgatcagtttcggaaacggctatatccaaacggcgtcgagcggcattaacaccaagcgccggacggttccgatcgtttatggcggttcagattgggaggaggtttataacttctgtcaggatcacgtaaccaagccgtttgtgtggaaggcacctgatggaagaatgggcgtattcgtcgtaactgccgactccgttaaccttgcgccgcatggtggcggcgtgtttgaggtaactgcggagttcgccgaacgcttcacttcagccggataatcaaaagcgccctttacgggtgcttttttttggcctatgatctggagtcaattagaggagggcttacgatgacagccaacatttcaaaagagtttacgaactgcttacaaaaacttttccccggcgagatcctgacgctgatcgatatcgacgccacaaagttcggcgggcaggtctaccgattccataacgagaacgtcgcctatacaaccgaggagcttttagcggcggtgaacggcgggacgcttcagccaaaaatgatcacgtttcgcggcgagcaatacggcccgcgcccgttcggcctgggcgggatcgcaatgtcgagcgatggcacagtggaaaagccaacgttgacggttagcaatattgatgcgcaggcgagtgctcttattcgcgcctacaacggcctcatgcaagccaaagttacggtatgggttttggtcaatgaattgctgcaaaacgacggcagtgttaaagagggcgattttaggcgatttgtttactacatcgagcgaccaaagcaagtagacccgcaaaaggcaacgttcgaattaacatccgtgtttgatatggacggattgatgatcccggcccgactgacgcaaaccgtttgctattgggcgcagcgcggctggtataaatccggcaagggctgcgactacaacgggcagaacggatacttcgacaagttaggaaacagggttgacgacccgtcgcgggatgtttgcggtggcctggtgtcttcttgcaggcttcgttttggcaatgaaccgttgagtttcggcggttgtgcgacagcaactttgaagagtggtagctaatatgttgactccgaaaattaaaatgcagatcatgcagcacgcgaaggaagtctacccgcacgaatgcgccgggctggtaacgcaaaaatcacgcgtgcaaaaatatcaccgactagacaatgtttctcaagatcctgagaacgaatcaatgccggacgaaacgcagtatgcgatggcgtcaatggagggggagccgatcgccttcgttcattcccatactggcgacggggcgaccacgattccgagtgccacagatttatgcttttgcgatgagtctggattgtcgtgggttatcgtctccatcccggaaggtgatatgcgaatcattgagccgaaacgccgacctctgattggtcgcccctgggctttgggcgcttacgattgctatggcctaatcatggattttcacaagcgccacggcgtcacgctaaaagatcggcgattgccgttcgaatggtggaagccggaatacaaagagaatctttaccaggattactggcaagaggacggattcattgaaaacactggcgagcctgaagttggcgatatgatcatcttccagattcaggcggaaaagtggaatcacgcgggtatttacgttggaaacaataacatccttcatcacgcgtttggcaagctgtctcgccgggatatctattctggatggtacgagcagcacaaggttttaatttgcaggcacaaggagcttaaacatggcatcacatacaaagacgattaaactttctggttcccttgggcgtaggttcggagtattccacaaacttgcggttgattcggttgctgaatgtatccgggcgctgtcttaccaggttgaggggtttaagcctttcatgcagagcaaggttggtttaaatatgcgcttcggcgttgtcgccgacggaaaaccaatcagcgcgaacgaccttgcgacttttgccgtggcgagggagattagaatcatcccgatcccaaaagccagaaagaacggcgggttgttgcaggtcgttatcggagcggcgattatggttgcggccttctttactggcggcggctcgctggcggctatgggcgctttttcgtcggcagcattcatggctggcggatcgatggttttaggtggcgtaatgcagatgatcgcaccgcagatgggcggcaacatgcgggcgagcgaatcgcctgagaataagccatcgtatgcgttcggcgggccgattaataccacggcggccgggtatccaatccagttgccatacggttacagattggctggcggcgcattgttcggttctggatcttacgcagaagacaacaactaattaagccattcgctttttagcctgggggcgtagcctccgggctttttgtcgtgtacaattgcgagactattaacaggaggctaaacgatgactaatatcaaggcccgtaagggaggctcaagcaagccgcgtaccccggtagaaatgccagataacctgatctcaaaagacaagatcaagttattgctggctgtttctgatggcgaggtcgttaacgacttcagtttgaagcagttgcatttcggcggcgtcccggttcaaaacgaagatggaagttacaactatgaaggcgtgattgctgagtttcgccccggcacgcaaacacaggactacatccagggcttcagcgaatcaagtgctgagttccaggttgctcgtgaagtcactcacaacacgccttatacgcttaccgtatcgaacaaaaatctgtctgctattcgctttcgcctgttatggccgcgcgtgctgactcaaaaagataacggcgatatggtcggatcggttgttgagtacaagatcgagatggcggtagatggcgcaagttatcagacctacctaactggcaaaattgacggaaagaacacgactggcggttacgatcggagcattcgcgttaacctgccgcaaaacttcacgtcgcaggttcttatccgcgtgagccgagtaacgccggatgctgacggggtgaaggttgtcgatgccttccaggttcaatcctacgctgaggtcattgatgcaaaattccgctacccgttaacggccatgctttacgttgagttcgatagcgacctgttccagaaccagatcccaaccatctcactcaaaaagaaatggaaaattattcaggttccgagtaattacgatccgattaatcgcacatactccgggacgtgggacggtgtttttaagtgggcgtggagcaataacccggcatgggtgctttatgacctgatcatgaatcagcgctatggtttagaccagcgtgagttaggaatcccggttgataagtggtcgctgtatgaggtggcgcaatactgtgatgaacttgttcctgataatcgcggcgggatggaaccgcgctatttgatggatgtaattgttcaatcgcaggttgaggcgttccagttggtaagggatatttgttccgcgttccgtggaatgacgttctacaacggggaaagcctttcgattatcgtcgataagccgcgcgatccggtgtacctgtttacggctgataacgtcgttgatggcgttttcgttcggacgttcccaagcgaaaagacgatgtacacgtcgtgcaacgtcatgttcgacgacgaagaaaaccagtacgaacaggatgttgaaccagtattcaaccctgacgcagccatgcggttcggccacaacccgaccagcattacagcgatcggatgtaccagaaggacagaggcgaaccgccgtggtcgctggattctgcaaacgaacctaagcgccacaaccgtttcgttttctactggcctggaaggtatgattccttcttgcggcgatgtgatttacgttgcagatccgcattggcaatcggcctttaacctggtgctatcaggccgcgttatggaagtgtctggcgtgcaggtgttccttgcctaccgctgcgacgcgaaggctggcgacactctgatcctgaatacagacgacggcaagccagtgcgccgcacaatcgccagcgtttcggcggacggtaagaccatcacgctaaatgttgggtataactttgacgttgcgcctgacagcgtattcctgatcgagagcgatcagcttgcagcggaacagtatgtagtaacccggattgaaaagggtagtgatgacgacgaatttactttcgccatcacggctacgcagtacgatccgaacaagtatgacgcgatcgataacggggtaattaccgatggccgaccaacttcggttgtcgaccctgattcaatgggcgcaccgaaagacttaacgattagctctttctcccgcattgttcaggggatgagcgtcgagacgatggttatcggatggtctgccgtgcagtatgcaaaactgtacgaggtgcaatggcgcaaggacggtggtaactggaacaacgttccgcgcactgcgacaacgcaggttgatatcgaaggcatctatgctggcgagtatcaggcccgcgtgaggtgcattagcggtgggaatgtagcgtctccgtggtctgaattggcaaccgccacactgaccgggaaagtcggagcgccaaaaggcccgattaacctgtttgcgtcggacaatgagatcttcggcattcgagttaagtgggctatgccggaaggagcggaagacacggcatacattgagctttaccagtcgcaaagcggaaccgatcaggacgcaagcctgcttactctgattccttacccggcggctgaatactggcactcaattttgcccgctggctacgtgaacttctacaaagccagaagcgtagaccggatcggcaatgtttcagaatggactgattacgctcgcggcatgtcgtcgactgacgttaacatcatcacagatgcgatcctggatgaaatcctggatagcgacgcgatgaaggaactacaggaaaacgcacaggatagcgcggcaaaactcaatgactacgcgaacagcatcattcaaaatgcgctggcgaatgatgcggacgttaggaaaatgacgaaggagaacggtaagcgtaaggcagagatcgcgcataccacggtgctgattgccaacgaatcagaagcgagggcggctgaaattacgcaacttaaagcgcagattgatgaagatatcacgtcgcagattacgatccttaacgaagccctggcgacggaaagcgagacgagagcaacgcagattggtcagttgcaggcagattttgcggctgatattgacggcgtaaaaacaacaatgaacgctggttttacgcaggttaatcaggctattgcaaatgaaagtgacgcgcgtgcaagttccgaggcggcactagatgccaaaatcgggcagaactccgcagcgctaaaccagaaactcgactcgtgggcgaacgttaatggcgtcggttccatgtacacgatgaagttgggcttgaggtacaacggtcaggagtatagctccgggatggccctacagcttacctcaagtggtggaagcgttgtttcgcaggtgctgttcattgctgatagatttgctatcatccgtaatgcggcgtctggcgcgtacacgctaccgtttgttgtgcagaatgaccaagtgttcatgaataacgcgcttattcaggacggttcgattaccaacgcgaagatcggtaacgtcattcagtccaacaactttcaggagaatgttgcaggatggaggcttgataaaaacggcgtatttgtcaactatggctcaacttctggcgaaggttccatcaagcaaacgaaccagaacatcactgttcgagatggtagcgggcgcgttcgttgccagttgggtaggatcactggatcatggtaaaattaatgccgggagaaatcccggcttaaccaaaggaggcagacaatggcttatggttttcaatcatgggatgcgaacgggaaccccaacaactatgggatcgtccctgtttcagttgctggatatattgcattagcgcaaggccagaaaagcggaacgtggtattacaacgtcccgcctgggttgaggcttggtttcttttgggtcgcaaatcaagaccagtacggcacatcgaagaggcgaattaccgttagtggtaatcagatcgttgtttcagatgcgccagatgatgcgctggaatcaggcgtctacccggcgacgcaaggttttattgtcgttcaaattatgagttgatgattatggcagattacggaattttacttaccaatgatagcggcaatgtttgggtttcgcctcaaagcatcccactggcactactatcaaagcagagcatcactcttaggggtggtactaactccgatgaagtaagatcggtaacttacgacacgaatcacccatgcgttccgttcgtggtctttcatggatcttcgccacaaggtgcattcacaaaaatcaagtacagcggaaacacttgcagcgttgttttttcttttggtaagcaaaacgtatatgcggaggtttattttttctccgtgttcccacagccaaatcctggttatgggcttgcaatttgggatgaaaacggcacgctgattttgaccaatgaaaccagaacactttcagacgtacagacctacggcactggttttaatctaaacgtcactaacggcgggaagtgggcggttagtcctgttcagttaggcgcgatcgttggtgttgttcgcgatccctacccaagaccatttcagggcgactattgcgcagcggcattctttaacggctcaagcacgcaacttaccgcatatctaacgcaggcaccaggaggagccgccagcgatctaacctacgtcaatatgaaaaacacctgcatcgctattgattgcgcaagatacgactaaaagaaaggggccatacggcccctttttctaccccttgagatttttgatctcctcttttaattcatcaacttgagcagacagagctttgattgcgcaaattgcatccatcaaaagagcattattgtcaagcacaagtttcttattttcaactacgttaccctcatcatcctgataggatgcgctgctttctttaacgtagcacgaatcgatatctcgcacctgctgtgcaataactcccctacgctcgcgtttcttaacatcatccttataggtgaacttgaccagattcattgctttgatgttttcgagtgactgcaaaccatcataagcaacaacattgtctttgtagttaatgtcagatagaccagcaaaaacaacgttgccataagcagtgcttgcaatattaccatctgatttaaactgccaatactgcgtattaccgccagttccccatttgctgacctcaataacggcacgatgttcataacccctatgttcctcaagccacatagcgcaacgcgcaccgttaccattaatgttgaaccgtgagataaatgatggagatttaaggatatcaccattattcccatttggatcgctagttggccacgctacaaaagcatcattaacggtactcctcacagtcccatatgacacaacacttccgcgaagatcggcagccccgccaactcgcaacgtgctcgacattgtaacagcgccgcgaagatcggcagccccgtcagcacgcaacgtgcttgacattgtaacagcattgctaaagtttgcattcaacccggtaacagcaaagttcgatgcatcaaaaacaacctgcttcgcgctgttcatatctccattagggcggaagtacattccttgaccattttcagggattgagtacacgatcgcattgctgttatttgccctaatagtgcaaccgttcagggtcagcgtggcgtttcctccaggaacgctaattgcctgcggctggctgaacgtgttagctacgttggtgcgcgggatcgtattatcattagccatcaaatagtcagacggtgaattatatacaattccagaaggctccgtgtcaatccaggtataaccagtgcgatcaatgattggccccgtaatcgaccctttgttagcctgtacgtttacatgattcaaccacagttcaggaacccatccgccgggagcatgaatataaacatcaaacgaggagtctgtgtttttcaccaccccaagattaatgcgtctggtgtcgtttggtctggcagcaatcagggtgcgctgagtaaaccaagtgtcaatattattactggttagcgtatcgggaagaccgcggccagaaatcgaaaagatatcaaccgggagatttgcagtgccataaccagtacctccgccaatgatgaactgagcaaatgcgtagccatcaccagcgttcttgacgttggcgatcttcatccacttctccccagcgaaagtgccagtaattttatccggcacctggacgccagccacaaggtcgacaacctgatcacgaagattttgcgtctgccccttcgcagtttgcgcgtcgttcttcgccgagttggccgcagtttctgacgcttttgcattggtctccgaggttttggctgcggtttctgatgcctttgcattggtctccgagtttttggccgcagtttctgacgctttggcgttggtctctgaggtcttcgctgcggtttctgatgcctttgcgttagtctccgacgtcttcgcagcattcttggatgcagcagcattggtctctgaagtctttgcagcggtttctgatgcctttgcattggtctccgaggttttggccttattctccgaagatttagcgttcgtctctgaggtcttcgctgcggtttctgacgctttggcgttggtctctgaagtttttgcagcgctttcagacgcagccgcagccgtagcgcttgcgcccgcagcttcggaatctgccctcacctgatcggcaagactttgcagagcttcgaaatcgaagttcttaaagaagtcgacagcatccgcaatttgagtttcctgtgactggtagtagcgcagagtttccgcaacatcttgcgccagtccgtcaacggtcagcgagtcacttaacaggatcgcgtaatcgctagacgctacgacagcgccttttgtggtgatggctttaatttcagtatcgctaaccaccttgtttacgacggccatttgaattggtgacgacaaaaacataatcgtcgcaccagggcgaatcagcgaaagcgatgattgccattttgtgccagtcccggtaacggttccgtctgcggccatagccgctttgccttctctgtatagtgccatgtttttaagcctcattggttgattgagtaacgcagataatagcatcaatgaaccgataaaaaaaggagcctttcggctcctttagttgtcaaattagaacgggatatcatcatcgaaatccatccccgcattcccgccgctgttttgcggcttaggcgcttgttgcggcttgggttgttgaggctggccccacccggattgctgattgccgccgccgctttgcgaaggatcgcgctggctgaattcgagttgcggcataatcatttcgttgtggctgtaaattgtgccgttgtgctcgcggttaacgatctgaagcgtccggcaggttacgctgatcaccttatccatttgcagcgcttcgtcgtaccacttaatcatgttttcttttgcaaagaaaactgcgcggtagttcgtgtaaattgtttcgtcctcgccatcacgattgcggatcttcatccgctccgacaggtctacggcgtacattttccacggcccgttattgttgctgccctctttgacataaggcgcttttcggattacccctgttacaacatgcattgtcattcctatggggcggcttcccgcccgttaaattagttgaaagatgaaatatcttgcgcttctggttcaggttttgattctaccttttccggctcgcgcttcgcaacctcttgcggtttaccggggttaaatccgtttgccggggtgactttcagttctgcctggcgtttggtgatatcgtcttccgtcattttccactccgccggggttaacgtttgtttcgccagcttatagatctcacgaagcgattcgagatcttcgcacgcgtcaatgcgttttttgaagtctttcggtgtcattttcgtaatttctgcatcatcatccgcctgcttgatacctagcgctgcggccagcgcataacggcgggcgtaagatgttgttgagccgtatgcttgttcgacggttttactgatcggcatattgtactgaaacgccatgaactcgccgctttcatgcaaaaacatagtttcgaggtgcatcaccttttcggtgctcgtatccatcatggattgaatgaccataattttgttcttctccagcgccggggaaatagcgtcgaggatatccccaagattcgcataggtgttcccaagatggttgttcttaccgcttttctttgcggccacgaagccagattttgccttgattaatgcggctgcgatggtggtaaatttttcagatgtacgcatgataaagtttccttttcctaattggtaatgcgcactatatcacaagtgcgcaccagtgtttagctatttgtgccgtatacgtccgggaacatgtatttcacaaactgaggagtcggcaaaacaacttccgccgcgtttgactcatatgatggccatgaatcgtgcttcacgcattcagcatactgatgaatcacgctttgatactgtttgcgaccgatctcgatctgctggctggtcagggtgaacgccagcggagcaaacggtgattttttctcctgcgttagcagtctgacaactaccgggcgtttttcgttgtaagtcttcacgaacagatcgcgctgcaatgccatcttgagatagtagcccaagttgaaggcgagtcgcccgaaatcgtcaggcttggaagattgcgtggttttgtagtcggtaatcaccacgacctcgaaaacctcatccgggttgaacccccactccttgatgagttcgggatcggaaacaacgtcaacatgatcgagtcgaaccttaaccttgacgccgaagatctcaccgaagattgacaattcacgctgtgctgtaggcgattcgatacatgcggcgtgtcgcgggttagccagcatcacgctgcgcatttgaacaacggcatcgaaatcaacatccttaaccagcttgcgcccggagtttatcgcggcgctttcgtcgcacagttcaatagcccaccaaacatttacgtcaatcccggcgcgatatgccatttccagaagttccgggtaatccttgttggacgtcccaatcaggccacacgctttcagcttcgcagacagtgccgacttcgacgtaatcagatctttaacctcgcccggagaagtcgcccgcaggtactcgccattaaactttgccgtctcaagcatacaggtatgcgaacaggttccgaacgccagcgcggctgcttcctcacgcactttgaatttccagtgcgccggggatgttgcgtaaatctcgccgaggcttgagccgctaacgtattccgcgcaccaggagttaggatcgtggtaatcatcgttggataattccgcgttggtgtatgccttaaaaattgcttcagccattggtatcactccatttgtggtttcgttgcgttaagtatacgcatgacgattccaggcgcaagtcaaaaagtgctatccgcagttggttaaaaaacgagcgaaatttacgtaagatttagtaagatgcatcttacgtgatttttcctatatatttcatttagttaatgcaaatcggtaagatggtaatatccctataggtaaatatccatgaaaaatatggcgcgaaatccagcgaaaaaagacacgcaccccggagaaatcttaccaagattgatagatacagatagagtaataataataatattgttatttatcatatacttactatctatatattgcggttaattggttaaattttgcgcgaaatttacgtaagattcatcttactaaatcttacctaaagtggttcgaccagctgcaagccactgaatttcaggcataaaaaaaggtaagactgatttgctcaatcttacctaaattctggtcaacatttaatcatagaagcgacgatgccctgtacaacttgcgttcaaatccgagcttaaagttgtcaccgttcggaacgataactttaagatcccgatcgtcagcagccgccagcatatcccgatctccacgacggcaaactacccgcatttctcgcttaccttctccgccattgcctttatacctgtacgccacgatctcgacgtttgaaggtatgatgcaggcccaaacgtcgcacttgaacgaactggcaatattaaagtgcatcgcctcaatccaggatcgagcaaggtaaatcggcccgttaccgtcgtcgctctgattggtcactatcaccgatccgaatgtcagatcgccagccaacatcttctcccgaccctcctcatcaatgaacagcatgttgcaatactcatcatccggcccatcctcatgcactagttgcattggtagcgcgtgaattagctcctgtctgcagttctcgtgagtttttacgccaaccagatatgatttgatatgctcattttcaatgccctcatagagcgttacaggcgtgctatcgacggcctccgttctgtttaaaactgccatcactctttcatgatctgccatctttccgtagtcatacccgttatcacgagctacctgcttgtttctcttgactacgtattcttgcggaacctttccgagatagcgcccaagaatgttgatgcactcgctatacggctggccgcttaacttcattaaccagccgatccccttatcggcaccgcaaccgccacagtatgcgccgccatcacctcgcgtttccagcttgtcagtccagcggaatcggtctttgccgccgcagttcgggcagtcctggtgcttgccgttgaagtatcgagagtggatgccgcaaatgttctgcaacgcctcgcgccacatgccagccatgtacggcaaaacctctttttcatcgtaaaaatccacgtcgtaacccccaaataaaaaacgcctacacgagaatgataacccggcaggcgtttagtgtttagtcaaattgtgctatcggactacgcggagcatttcgcggcggtcgcatcggcgcgtcactggcttgccgttgctgtcaaatcttaaatcaggtcggcagaatgaggcgcgaaaacctttgcaattgttccgtcggtagctcttatgtactagataagcgccatcggctgagatcataccgcgcttacgccactgctgaacaacctggatactaactcccaactcttttgccgttccagcgataccaccgaaggcatcaataaccagctccatccgcgcagtcaacccagctcgaacctcatccttcagcacgtagtaaccagtcggtcgcttgcgtttcttcttatctttcccgcgcgacgttccgttgttgccgttcaaggttcgcttatcaaccattgccatttgctccataattcaaccctcatagcattttttgttaaacctgataaaatgttccatgtattatacacgcaactatgcgaatgacaaattaggattgacaatggcaagcacagaagaagacgtagcatattttaagcgactatttcgttatgaaggcggaacactgattcgcaaagttacaaccagtagtcgtgcattcgctggagactccgtagggtgcgagaacaacgttgggtatttacaggtaagcgtaaaaagcaaacccctatacgttcaccgaatcatttgggaaatgcataatgggcctatcccagaaggaatggagatagatcacatcaaccaggtcagaacagataacagaatcgaaaacctgcgactggtaagccaccaagtaaaccttaaaaaccaatcgatgaacagtggcaatactagcgggcacgctggcgtaagctggtttaagcgaggcggtaagtggagggcaacaataaaggttggcggaaggcaaatacacattggttacttcgcgtcgtttgagtcggcagttgccgcacgaaaagcagcagaaaaacaatatggttttcatgataaccacggagcagagaaaaagaaatgagcttatcgattgagcaacaaatagatctatacgcagacaaaatcccggcaatccaaaagagatttaccgttggaaatatcgttccgtatccatatcaggctgtggcttatattgagacagccaaaagaatagcaaactacaccgcaccgttttacattaaggcttcggtttccgccgggaaaaccatcatgatcgccatgctcgcagcgcagtgcaaggcaatgaacttacccatgatggttcttgctcgccaggccgagatcgtgaagcaggattccgaggagatcagtaacctcgacgttccaaactccgtttattgtgccgggttaggcacgaaggcggcatacttcccgatcgtcgtcggatctgaagggacggtggttaatggcctgtttaaaatgctgggcgactacgtgccttcagttctggctattgacgaatgccaccaggttgactggcaagatctggcggaagcgatcgccaacaatgaatcgttcgagtacatgagccgaccgaaggataagccgtatcgcgtgaacggggaactggtcgatgccgaccacccatacgacgaaaaattcgacgacgtagaattcggcggcggtcgcacgcagtacactatcgtcatttgtgagttaatgcggaggtgccttgagaagacagggcgagaacttcgcatcgttggctatactggttcggagtttcgcggcgtcattccgattttacaggaagacaagagccagcctggtttttggcgcgagcagatcaccgacattaacacaaactatcttgtcgagttcggatcggtggttccgacaatttttggtgatactgaatccgaagggttagggtatgacctatcagaattccacggttccagtcaggacggtacgcaggattttagcgcggaagaattgcgcaagatggaaaagaaaatccatgaatccggcgaaatgacgaagctgattatgcaaaaggtcgtggagcgtgcgaaaacccgaaacggagttctgataacttgcgctggacagcggcattgcaaggaggcggcgagctatctaccgccggacgcaacatacgcgatcatcaccgaaaagacgaactcaaagaaacgcggcgaaattttggataaggcgaatcgcggtgagatcaaatacatcttccaggtgatggccctaaccactggcgttaacgttccattttgggatttttctgtgatattgcgcaagatcgggtcgcttacgttgcttattcagcttttggggcgcggaatgcgacttctgaaggactggcaaaaacagccgccttactcgtgggtgaaagaagatcaccttgtctgggattttgccggaacaatggatgacctgggccagttgtatttcgatccgatcttggagcaggcgcaataccaaagacgcaagagcagcaagaacggcccgaaaatttgcccggtatgcaagggggaaaatagcgagtacgcccgcagatgcattcacaaagacagtaacggcaatcggtgcgaatacttctggatctcgcagaggtgcgaagaccagaaagacccgcgaacagggaagattaaaatcaaggggtgttacgctgaaaatgatattgttgcccgccaatgcagatgctgcggcgttcagcttaaagaccccaatgacaatctcaccgggaagcactatacgcagaatgactggtatgatgttgtctggttcgatatcggcttgactcgcaatcagtccgggatcatcttcaattacgtgttactgaaccatgacggcgagcgattcaccgcaagggaaaagttcttcccggaatcagagaatcagatttgcggcaagctgtggcggcaaaaggcagtcttccagcacgttagcgacgcggtaatgcgtggcaagttgggcggaatgaaaaacgcccgcaagatcctggagtatgcggaatacttccgcgcgccgaagcgcgtaacgcatcgcatcaacggcaagaaggaggacattatttcccgcaaagactttggaggcgaggagtgattacagacaaaggggattacctcgaatattacggcgggcctgtaaaggcttgcccacttgaaaaaatcgaccagatgaacagcgtttcgtggctgcgttacgaataccccgattatctgttctggcatacggttaacgagggtagcaagcacaaggcgagcgccgttgcagatcatcaaatgggattgcttaaaggcgtaagcgatatccttgtgctgattgggctgggcggaaaatacccgttcgccgccattgagctaaagcgccagggtaaatcccaggcatcgccagtgagcaaggagcaacgggaattcctcgccgccgtccgaagccgtggcgggttcgctgccgtggcctatggattcgagcagtttaagatcgcgtttgaagacgcaatcaaatagcactttttgttaaaactacccggcgcgagtcgggtattattctcccatcgaaacgaagaacggagtatttaaaatgaaaaagattattgctttaattgttctatctcttgttctcattggttgtagcgaaaaaccaaaaacatatatttgcggtaatgaatcgtttgaagttactagcgactatattaaggtggttcgcggtaatagcgctggcgttttaattgatggcattggtgaaaaccagtataagctggttacaccacttggaacggctttttatactgttaataaaaacaccattgatattaaagttagcgtttatcagaacactttaacttgcgaggttaagtaataatggcaaaagatatcacagacaaagacactcacgacgcgttcacgactttcgaacagcttgagcgtgaaacgttcataggcaacgcgcttgccactggcggacactatcaggccgtcaagcctgataaattctaccaggtaacgggcaaccgctacgccgggagcaagacgccggatatcgtccgcgacaagtggtcaaccgatcgcagccttattgcttacatggaggagcgttacgggccatacgacctggacgccgccgccgaagaaagcaacaccgtctgccctaagttttacgacgaaaagaccgattgcctcaagcgctggtgggggaaaaataagcacgtatggcttaatccgccttactcgttcccggatccctttgtgctgaaagccattgagcagatggagcatgacaaccagatcgatattttgcttcccggcgacaactctactgcgtggttccgcgacgcacagaaggcagcggctgagatcatttggattgtcgcagacgtcacggaggacgaagacggaacgcaactaagccgatccggtcgcctagccttcatcaacggcctaagcgggaaaccagtcgacaacaacaacaagggtagcgtgattttcatcatgcgcaaactcaagccgggcgaggagcaaaaaacgttctacgtcccggtaagcgaaatctgcccttcattaactaaaaagcgcatgcgcaaacgtgggatctgaaaaatggaacagcttgaatctttcaccgaatacctccacatcgtcgtcactctgctggacaagtacggcttcatcggtacggatgaagaaaagatggccttcgccgatagcatcgatggcacttatcaagaattcatggataacggcacgccgcttgctgactggcccgcgattcttgagcgcgaattgctggattttcgggcgcgtgaaggtgcggaatatttcgcgaaacagcactaattgttaaacaatgcccgccgcgagcgggtattattgttccatcaaccaatcaggagctaacgccatgaacaccaaaaccattgccgacaccatcaagatcgcacaagttaagccgcgcatcgtatctcgccacctgattaacctttctcgcctgtgcatggccgactacgtggcgaagcctttagagaatggccttgatggtgaaatcggtgcgatctacttccgcgccgcgcacggcatcgaagaaattcacatgtacgagcagatggcggaatgcttctgcatttacggtgacgaatgatgattgtagaatctggccgcgctgccgtatggcagcatgccaaagaggctggcattagtgacgatatcgtgatgatcgcaaagtatttcgatatcaaggatatctccattgtgttcaatgggaaatttacctatcttcatgagcgaccactgaagcgaacgcgtatagcggttgcgacgcgggcagaggccgacgcgctgaagatgttcattcacgaatctaagcagaccaaaaaatattacaagtagcgggagtgttgagaatgcgatatattgcgatcctgattacggcggtggttctcactatcgcaatcttcaactacgcaattcaattgggataaattatgcaacctaaaatcacagacgaagaatttttagccgcccgcgaggagggcaagacctaccgcgagatcgccgaagagttcggcatgaacgttcgcagtgttgagcgtcgcggcgttcgacttgcccgccaggggcatttgcacggtaacaatcacgtagcgaagcacatcccggacgggttcggggtcaaaggcacatcgaccatgattcgcgcgaacggtgatgaagttgtgcgctgggtcaagtcagaagtagaccgcgaccgcatgatcgctttgatggaggcggcgcaagcatcattctgcgaagacctacctcgcgctgaaccgcagcctaaggatgaatctaagttttttattgaggatcagctcgccctgtatccgatcttcgatttgcacatcggcgcgatggcccacaagcacgaatgcggcgagaactacgacaccagcacggcggaaagggttcttaaccgcttctttgactactccgtttcggttgccccgcagtcgaaaaagtcggtcttgctggtcggcggtgacttccttcacagtgacggcctggacgcagtaaccccggcaagtggtcacgttctcgatcaggatagccgttacgcgaaacttgtttatgtggctattcgctccttgcgccgagctgtgtcgctactgctgagtaatcacgaagaagtagaggtgcaggtaatcgaggggaaccacgatcaggctggcatgatctggttgcgtgcagcgctcgcagcgttctatgaaaatgagccgcgcgtattcgttgacgtcagccctgcaattatgcatcgtaccgtgtggggcaaaactatgctgggctacactcacggccacacgatgaagaaggcagaaacgcgcctcgccgcaatggctacagacttccgcaaggaatttggtcaatgcgactacatctacacgcattcgggccattggcatcaccagaccgtaacggagcactcgttagggattgacgaagtacacggccagttaggggccaaagacgcttacgccgctcgcggtggttggcgctcatatcgccaggcggcggttattctgtacagcaaagaatatggcgaagtaggccgctttatctaccgcccgaacatgtaaccacaacggccccgcgaggggccaacaaggaaaaccaatgaatagaaatatctgcattttcgatctcgatggcacgttgtccaatggcaaccaccgtttgcacctgctgccgaaaaaagatctccacctaaccgaaagctggacggcgttcaacatggcggctggcggcgacgctcccattacggacacgatccgggtaatggaggccatgcgcgcagcaggatttatcgtcatcatcctgaccgggcgaagtgatgaggcacgcgagatcactgaaaaatggctggtgcaaaatggcgcatcgcattacgacctgctgattatgcgctccgcctccgacaaccggaaagatacggttatcaaagaggaaattttacgcaagattggcattgagcgaatcgttgcagcgtgggatgatagccccactgttattgcgcacttccgtagcctgggtatcacaacttaccaggtctgcgactacggcgaaaaccttcacgaccatctgaaatctcatggagtagacaaatgaaaaatgtaatcatcctcaacggagcgccgggcatcggaaaagacaccatcgcggaaatcatcgcccgcaaatgggagtatcggatcctgagtttcaaatcaccgatgtttgacattgcgcgcgccatcctgggtgcaaccgactttgcccgcttcgccgtccgttaccacgaccgcagccggaaagaagtaaagtgcgactttttaggcgaccgctcgccgcgtgaattcctgattcacattagcgaaaatttcgtaaagccgacgttaggcaaaaagcagttcggcaagttgctttgcgattctgtcgtgaattcgcctgttagttgcgtcgtcagcgacggcggatttgacgaagaagtagagcacatcgcggcgcacgatagcgtaaacgtctttgtcgttcgcctgcatcgtgacggcatgactttcgagggtgatagccgcaagcatattagccgcccggatctgatttgcgaaacttatcacgaattcgattttgatatgacgactggcgagccggaagacgacgcgcaaaaaatccttgatatggttttcgaagggtattaatattctctacgtaatgcctttattatcaccgccttaaactttgggagccttaacaggttcccttttttttgttctttatttggcccaacgcatatatcatcgcattatcacttaactaacagaggttgcatatcatgcgtgaattcatcaacgcggcaaccaatggtagcggcggtgttaccctcgcaggctctgcgaccgggcaacttatcattgcggccattggtttatttttcatgattctattcggctcattcggcgcgtggttgcgctggcgagattcaaaggcgctgcgtgaagcgctggaagccggggatatcaaaacggcggtgaagatcaggagtaaataatatggggattaaaacgcgggttacattcgcagcggcgatggcgatcgctgtcgccttcctcccgaaagtggaggacacgaaatacaaggtttataccgatatcgctggcgtttcgacggtctgcgaaggcatcacagggccggacgtaatcaaggggaaaacctatacccggtcagagtgtgatgcacttttggagaagcacatccaggtcgcaaagcgtgtggttgacagcaaaatcaaagtggccgtgccggacaccttccgggcgtcgatgtacagcttcactttcaacgcgggcggtggcgcatactccggcagcactatgctgaagttgacgaaccaggggcggctatatgaggcgtgcgaacagctttaccgctggacgtactaccgcaacccgaaaacgggtaagatggagaagtcaaaaggcttgcataatcgccgggttcaggaatatcaactatgcattaaggatctaaaatgattaaggtaattggtgtggctcttacggttgttcttctgtctggttgcgcttccagtgtcccgatcctttccgatctggtgggcagcaagccggatatgacggcgcaagtaggcgcggagaacgttaaacaggcggttggcgtgacgaacaaaacggacacgtcaagcaagcaggagactacgttcaaagagtcggcggtaggaaaggttgacacgtcgaacaaaaaatccgtaacgacctccagcattcacgccaaccagatcacggcggacaagatcgagatccgaaacgatgaaagcggaagcctgactccgtggctgattggtggtgttggggttgtaatgctggcgataggtgcgttcggtctttggcgggaacgaaaaaacaaaggggcgtaatgcccctttttctatatgtaccgcttgacgtgcaatagcgctactccgtcttcatcgttaagaccatgttcaaccgtgttggttgcagccattccttgatagagcaagatgagcgcggcacgcaagtaattttctggtgtgatctgtttcacacaaacaagcctgtgaacttccgttatcagatcttccacctggtttcccgaaaagctgttcatcactgagttggtcaaggtgcatcatctcccatatgtatcggttatccatcccttcgaacgaccggaaatcaaaacctatttccctgttatccggccccgtacaccacacagagccgttttttccgtcaaggtatccattcgtatagcttcgcgctaaaaactccttagagaccattgaggcgaacatacgttgcgatacgttggcggcttttgccagtcgaggcgcttcgcggtgcgtatagacgaacttcgcaaaatcctgccgggtgaactcccggcgagattcgcagaacttgtaaatgtcaagaataaacatcaattacctcatgaacgacgggttgataaagacttcggaatccatcacgcagataaagcctaattcctccatcttcggcaataagcgttccttaatctttttgctcaccccggcctggcctttgaagatcttcaggttgcggcaggcgttataaatgccctggacggtcataacaccttttgcctgtttgcagcgactggcgataacgtcatacatcgctttaatttccgctccctcaccagcaaagccggaagagtcagccgacgacaaatacgttttgctcaattcatggaacataatgatcgcttcgtcaatggtcgccgtgtcgatcttcttcgagcgcttcccgccgggttgccagttccggatcgtgtgaatcacggacgccagacgcataacctgcttatcaaacttacccatcgcgccgcgaagcattgtatgcgaatacttgccgccgtcgcctaactccggttctaactcctggcgggccttgttcagcctacgcattgccgcgtcagtaacctgcaacttaatgttcgactcgctcataatgtcatgaatcagccggaagtaatccgccttcagtgactggtcgatcggctcataggtcgaattcccgttttcgtcgatgaacacgcgttcacccaaacgggtttgctcacgaaccaaaaggaagcgttcagataccccgatcccgcgagagccggcctgcataatggcgtcgatggtttcatcctgggcaattacgcaaatgcagcccaaagcctcgaatgacatattgttgctaacgtcggcacgagcgatcgatacgtggcctttatcccatgctttgagcaccagttcgctgttcgtcttcttaccgccatcgtttccatacgtgatccctaaaaggctgttaaccgccgtcgcctcatcggaaataacggcaaagtttccctgtcggttgttaatcttcgccagaccttccggggtggtatcagataccgggaaagttaggtcacacaatttttctaacttctcctcaagttcgtcacggtcttcaaaaagtttcaccatatcagattgcgataactccccttttagcgcctgcttgttggcggacagcttcgccatgattttcttacgctctttctttcgagactcgttaatgcgttcgacttcggcgacaataggatcgatggcaagcgagttaatggcagacttaccagcggaaggcggctgcgacgtgataacgtaaagcgttgtcggttgctcgctgccgtggtactcgacccaaaagcggcccatcatcgcggcggatacggttccgagaaagtgcatgtaagcggatgattccgggaactgaacagaacgcgctgcatttagcgccagcttgccgacaacatcataatcattggcgatcgagattgttggatacttatccgcgtttacgtcgatatctttgggctttggccagaatgaaacggagtcacgatacccgttcgcacgaatcgcaacgcgcaggggactgatcccctccctttctgcgatggcgataatatcttgcggtgatacgcggtcatttaaaaacatgcccttgctcctgattggttaatcgttcggctaatcatatgccgtattaaatccgagatccagtgataatctaaacacgcttgaaaaacgcgcttggattatcggggcgcatggccccgaacccgtcacaggtatttagcttcgaaagtcgttccgtccgatacactgaagccaacttcctcgcggtacagcgtccagcggcatccatcacgatcgaagatgtatccggcaaccgcgccgagcgcacgaccgctttctacctggtagcgcttgccgacgctgaaggattttttcatcgggttgctatggtcaaggccgacgcattttagcgttttggtttttagttcgatgaacgtcgcaatcacctggccaccagcgccagcaataaacaactcgccgctaacgcctaccgacaaaataacgcgcttcttcttcagttcgacgctgtcatataccatcattgacacattgccttcatcgtcgacgcgggcgggataaaggttattttcgtgtatattaatagcgcggcttgacgtgcatttaatcttgattgacttcgccatttattttctttctccgatctcgatgtacaggtttaccaaatccagaaagtcagccttgcttttgcaacccaacttaaagccaacgtgcgactcaattttattttgcatcgcagccagtgttgcgccgccattattcatcctgagaacttcgcggcatacttcggcgagcttttgagatatcatttcttcaccacctttatttccatgccttcgcaagcgctcttgatatcattaatcagacgattaagccttaaatcagtcattacatggtgatgacgtatatcaataattccagcaacgactaacagcatgacggcaaagataaaaccaccaggcccggacatacacaaaacagttaacatcatcaagataataaatttcatttccgttttactccgttgcgtttcgatggggtgattctacccgactttcgccgggtagttttagaaattcgtgctattctcgataattcgcctggaacacggcgcgggcaaaacctcgcggagtaatggaacgcagcattttagtcctttctgaccttccacccaaaaacttccaggcccaaaagaaattcacgccttctactccatccggcggcgtgagccgtttcggttcgacaaaaccgtttccgtgccatatgcacgttttcttcgtgtaattgtcacagtggggcattttgggatgccacacaggctcgttcggagaaacatagccaccgaagtcgcgcggatggaaataaaaatccggctttcgccatagtgacgataatttcccgaccgggttttcgaccatccaggggcaaccatacttattgcctaattgctcgaccatcttcgcatcccctgctgcggataatacgtcattatcttcccttacgtgcttgattccgctatgcgctaacagcgtgcatggcgggaaagcgaaaatgaagtcaggatctggaatgccgagaatcgatcgcttaacgtcaaaatccttgtcaatccaaatgttaacatactggatatttgggtgaaccattcgaatgctatattctccgtggtcgccggagtcggcgttgaaacagtacaccttgcatcccttgatggcccacggcaggcccatgatgccggagccgtcgaacatgcagtaaataaccttttctttcatgctttccacgcctcaatgaacattctgttcgattccagcgtcagcgtgacgccagccagggaggactgaatgagacgaccgcccggaaccgtcccgatgatgtagcggcctttcgacttcgtgatcgtgatctgagtgaagccggaggcgcggttcatgcggagaacgacgcggccatgagcgttcaggacggcgagaatggaatcagtcttcggatggttcattgtgtagctccttcgtttgttggtatggggacagtatgccactatcccgctgtgttgttttagcaaaacgtgctattccggaacgcaggtcgcgtaatcctggctgatgtagatcgtgcgctgaacgcgaggttcgagatcaccgagttcctggatggtaacatcgttgcttcctacccggcacggaaccgatccgaaaataaactcgccagtctgcttgtcgttgatttgccatacattaccgccttcctttttgacaaccaggaaaggcgcactgtctgcactgaactcttccgggccacgaccgtagtaatgcgtgatcgcagctttggccgcagcgctgaaggcatcggtaacgtcattggtcgccttgtctcggatggccttgatacgttcttcaggcgatccgatgatgtaggaaaagctgttcgaaatggtaactgttcgcattatattttaacctcgttttggtggatgaagtcggcgacgtaatggcattcgatcgggttctcgatacccgccagcacctcgcaagacccgttattcagtagctggcaatgctggcactccgcaccgccaacactggcaatgacaatggcgatcccgttgcatgaaccgccgaacattcgatgagggaagtggtaagcatcgcaggtgcaaaccacctccccggcccgccgtttcctcatacctggcccttctcgatgcagaaaacccaatcacgagcgtcaaccgcaaagcgtgcaacgccgtcgagcaccacgaagacagtaaacccgttgacgccgcgacccttctcgatatcggtcacggtgcggaacagatcgcttgcgccatattgaattttatccccgacgactacatccgcaaatgctttcatggttaatctcctgactggtttcgatgggttaactataccaggcctcgcggcccggcgtttagcaattcgtgcttatttcactgctttcttcgctgccttgtacgcctctttgaaagccggaacatcttcgaccggaatccagaagccggagccatagccatcgtcatagcaagggcattggtcgcagtagtcgccccaggttttctcttctccgccgacagagaatccagtgggcattttgcataacgcttcctcaaccgcttcgatcttgtcggcgtcgctatccatgataacgaagttccacttgccgttatactcgctgcccaggttgattgattcgcgttgaagtttcatagctttagcccctttggctcaattcgtttcgttgaagtcatcatagcaaagccgatcggatggattttaacaaaaaatgctattcctgcgattgctgattattccaccgattcggaatagtggaatagatggtgattgcacctgattccctggtgattagttttgacgaatcatgattgcttttgattgtttcattttgtgcaacgattttgtgagtgtttcaggatttgcaacgaattgcataaatgtatgcaccatgcacgcaatttgccgatcgaagccagcaaaagcgccaggtgtttttcgccaacatttacgtcgtgtggaaatgtgggggaggaataatcttacctaaaaattgcgcaaaaagtgaccaacataagcctataatagatatataagtatatgataaataataatattattattattactctttatctatatatatgtttggtaagatttcttcggggaggttatggattcctcttgcgcaagccatagtttttagatgttccgccgcgaaaaaatgtatatagggatatataggggatgacagcaaatcttaccaaacacgcttaaacccttttacggcaaggcttgcgggtggtaagatgacattcccacacaagcaaaaacgacgtaaatgttggagaaaaacacatgcaatataaaggctatgagttcgaagaagtcgacgtgtccgagtggatgcagtacgacgcagataagcaggcagcttaccatgaatggctgcaatccatcacgtttggcggctcaccaggggtagacgatcggccagttgctgaaaagtcacccgccgcattcactggtaatcgttcgtccgagatccggcgcatgttcctggatggcgggcgacgtatccagatgacggcggaggagttcgcggataagttcggcgttcatccggtcgacaaccatttccgcaggccgttgctgaaactcctggagccgggagaagtgttgcgggtgagcctgggggcggggttgatctccgtctttaccgagttcgacgcaatgactggctcaaacatggaggctgaggcatacaggcggcagggcgctatctccgagagggaaaggattaagggtttagtggccgctcttgctgtagactttgccggacatgccctggccgggatttacaaggcgaacttgttcgcggctatcgatcttggattgaccgccagcgatatcagccaggaagcggccaccacgcaatagcactttttgttaaaacccggtcagagcgatcgggtattgtctttccatcgacaacgaaccgaggaaaacgaaatggtcactcttatcacatgggaacacgaaaacagcgagccagtggtgcgcgaattcgagaccgtagcggcatgttacaacctggcggcaaatggtggcttttacaaggcgcagatcgttaacgagttcggggttgttgattatgaattttaaggcgagcgacgtaaaacctggcgtggtctacggatcgcgcctcaataaccgcctttggcggtgggacggcgaaactatgtggactaaaggcgagggcgatgttatctggcatgaatgcggctggccataccccaccatgagccgcctcgatatcgcttattatctttcggttggcgatatgcacgagatggaagatagcactttttgctaaaacactgctgtcgagatccggtattatttattcatcgacaacaaagaggagatgaaaatgagcaagaagaatccatattcaaccagcaactaccataacgaacacgtcatgcgctggcactggcagaaactcaaagaacgccaccttgcacgccatggcaaataatcacaatagcgccgcttcggtggcgctgtatcccaaccataaaaacggcttacaccaggaggattggccatgccacgattttcagcaacaacaaaacttcgcaccttcgccgggatgccgatcccatactcatcaaccaaagccgtccagggcagcgagcacggcgtatacttccactggtgcggcaagtggcgcttcaccgtcattcgcggcttttacgtgacctgcgaccacgtggatattaccgactattccggcggaaaccaggttcatgagttcaataggcacgaatagcactttttgctaaaactcgatcggggcaatgcgttattattaccccatcgaaacagaggagcaaaaaacatgattggcaaccacaacaacgaactgaacgcagcagcccaccgtcgcgccgtcgagcagaacttcaacgcgcttaaagtagcctgcgatgagatgaaagcaatgcttgaactgccgtcatgggatccccaactcgaagactattacgacggcctccgcgtcaagcgtgacgatatcatcaaccgcctgcgcctggctggaatgtttctgtaaggagaacgcaatgattcacgaaattaagtctggaaaacaagtagtggccaccatcacgcagcgccacgttgtagcatttcagtttaacatccccggcaccaacgatatgcagtctcttgacgtgccagtttgggctaacacgatcgccattgatgccgacggctcgatttgggcctacgagtcgaccgccgaggatgtttgcatcccggactactcgcgcaaagcctgggtggattgtgggccttccgaaaacaagatgcggtcagtaggggagatggatcgcttccatgattgggcagaatcgaagattgaccttcgcggcctgaaatagcacgcattgctaaacgcccggtcaagggatcgggcataatcatcacgaagtctattaacaaaccgattatgcaaggagacagaagaatgcaacaatttgaatctcgcggcaagacatacaacctgccggacactgctacccatgccgcccctggtgcgtgcggcggcctgtattttaaggatggcgatagttggtttttcatgggggatgtggttgggggtgtaccgacgaagacaggcagcttactcgtgggcttctacgatcacgacttggtggagttgaagccaaagcgcgtaccgttcgctttctggaaaaaaatcaaaggggcgatctttaaatgaatcaattcgaattcctggcgcgtgcgcaccgtgcgcttgcaatgtacgccttcagcaagaacatgaagattatcagtgttgaggttgagttcaacaatatcagcatttccggctacgttggcgactcataccacgtgacgaaattcagcttcccatcgctggcttgcctggagcgtgaggcattcggtttctgaatagcactttttgctaaatgcccggtcagcagatcgggcataatggccacacaccaaacaacggagattcaccatgattcgcactaccagaccactacccaataacctttacgccacgattggggttcgcgcggtgagacttattcacatcaacgaagttggcaacgtggctattttgtggtttaagcgccactcaagcggtgttggcctgagcattcaaagattcgggcgctttaacggcaactcccaaacccattctcattgggttgatggctcatactgctggacgcacgttaagcacgtcgagaacttcgacgccaaatcactgagcgacgacgacgcctggaagatggtaacagacctcttcggttatgatgcctgcatggaggtagttggatgatacgtttatcagacttcgatcgccactgcttaaccgggcaatttggcgaaaagccagtaatgtgcaagatctcgaaggtaaaaggcgaccccgtcgagcaggtcaatacgcttaaaggcctggcaatgcgcaaccgactttacatccatgtgcgcggcagactgttcgcacagcaggttcatttttcgcatgggacgtggttctacactggcggggacggggttggcccatcgcagaaaagggttatgctgcgcgagataatcgaacacggttacgtttggactaacgggatctactaatggaaacggtaaaagtaatttgcacgcacgctggctattcgccgctatccacctatttcacgcctggccgcgagtatgacgccatgttcggccccggccttgatgaagtgtggattttgcaggacgaccagaacaccacggaagacgaagaattttggccagcctgccgcatgccggacgaaaagatcgccatgtacgccaataggccatacgaaaacaacgttttgtttgaggtgaaagtatgaaagtaagcaaaaagaaactcgcgctgtattgggccttcttcctggctggccttgccctgcataacagcgtgggctggcagacgatcggaatgctgtgcatgattattggtgtatgccgactgtctgagattaacgggttccgccgtggatatcgggcagcattcagcggcgaaaaagaatagcactttttgttaaaactgccgtaacgtcatttgataaagtggcgttactgaagtgaaacaatccaatcaggagcaacgcaatgaacgataatttaatcgcactgctggaagaactgaattcctacggctgtgcatacatcgagctttctagcgaacacgttatcgaagtcattattgacgatgacgcagggttcaccaagttaagggtggctaccggggccgaagaggaattcgaagactgcggcatccgtgaagtaaccaaccttctcgaagttcaccaggtgaaggagatccgctaatgaaaaccgtcaaactaatggttgtcaatgcggcccgcgaacgtgaacgccaccttatcggctgcgtattcgatgccgtcgaggtaaaagactcaaaaggagactttcacgtaatacagggcggataccttaacgaatttatcgtcaatccgctggatactgacgaagatttgaccatccgtgttggtagcgagccggaaaacgcgcttttccacctgcgtaaagtatcgaaggcatcgcagcgcaagttgctggttcgcgcactgaagcgcatagcgaagcagcgcggctacaccgatgcatacatccgcaagttcggcacgttcgctggagtaggtgattgggcgcggtcatgggccgacttttatttcaacaaatccggcgaattttgttcagcgcatacggactggctgcatggcacggaacacgatccagttaacggccacgagtggtacgaattcattgaggcggaattagacgccctttgatagcacgaattgctaaaacgaacgtccggggatggtgcatactatccccacactaacgaacaaaggaaattacccatgaacaaaccaaaaatcatcctgatcccgtccgtcgattccgtggttaatacttatgctaaattcaccaaaggcaagcgctataccgcaaccgcatttaccaaatgttccggcgaaatgctgtacaaggtcagcgatgactacgggcgcgagtatcacgtaaacccaagatcttcgcactatcttggtggccatcgcttcgatattgagtacccgatcgaagattgcagtaagcgcgactcgttcacctacgatgacagccgttctatcgccattcgcgctgcaaccatcggggacgggtttattagccgggcctgcatcgttgatctgatcccgtccgataatcacgccaaagacgacgccgacacgctgttaaatgccgtcgttcgcgccggaatcggcttggagttaagtgatgcgtcgtgcgaatcattcatgcgtgaaccgttctcacgaatcgcggagcttgaaaagcaagttgcgttcctgactggtgaacttcaggccgcaaacagcaagatcgagaatgttcgcaaaatcatgcgtagcaagcctggccatgacattgaagattacgcgcgggttttgcgcatgatggccgacgcattcgccaaactttagcagtagcacgaattgctaaaacagatcaggggtaagctggtatagttaccccatcgaaacgaaacggagttacagcaatgaaaatcaaaatcaccaaaatcaacactcttaacggcgacggctcaattaccctggaagaatgcggcctcaaaatcggcgaagttcttgaggtcgacggccacttcaacgacggctcatactgtgtgatcgctccgcgcaatagcgagtttatccaggctggtgacaatatcagcgtaagcgcagacgaatgcgaggttgtggaagaatgagcaacaaatttgggtactgacttacaccattggaaccaacgaggggcgcaaatcgcgccgcctcatctgcgacaccaaagagcgggcgattaggcagcaaaccgttcttggtggcgaacttgtcgagtatctccgcaagcctgaagcgttcaaggtgaactggccggaaggcatggatatcaacggcgctttagcgagcctgcgtgaattgcagaacaacccgaagacgtggagcgactttcaatgcctgcgggcggagccggaagtgaaggccgaccagttcaccaatgttcggtcgcagcacgcggagtggtcggatcgccagttcggcgacgttgggccagtcgggccgctcaaacacctggcgaaagaggcgatcgaggccgccgaagcgccggatgacattagcgagttcgctgatatcctcatgctggtatgggacgcaacgcgccgcgccggattcagcgatgagcagttggctgaagcggtggcggaaaagctggaacggaacaagcgccgggcgtggggcgaggtcaaagatggcgagccttgccaccacgtaaaaaattaacgaaatcgaatgccgtttaaagcgcctgtaagccattctggctggcgcaaatttaaggagtacgattgtatgcctgaatactcgaaagtcgaagatatgccgattggtgcaacaattactggtatccgcatgagcgagtcggacgacgccatcaagccgctggcgttcccggttacgcaggtggagacggacagcagaaaagggttcatcttcatctacaaaaatttcaatagtccgctgcgggttgaagtattcatcgctcgcggaacctgggtagaatgggagaaggccaaatgttcggactgaatgaagcgcagtacaacgccgtaaagcgcatagcaaagcagatggccgcagaaacaaaagacgccatcaagaaggacaagaagacctacgatcaggtcgccgcgaagatgatcgataaacattgggcgcaaatcaacacgctggttactcgcggccagtttatatggatagctggctacctggaaggccgattcggtcgaagggatggcgagtatgaataaaaaacagccaaacgattcagtgacctattgacgcaatcgcgctgatcgggtaacgtgaaccatgtagacacaagaggcggtaaacatccgcaagcctggccccggttaggggcgtttacataggagttatgatgcaatataaaatcatgctcacagcaagaaaaatgggtggcttttgcaaatcctgcattcaagagttcagcatgactattgaggcgaacgacaccgccgacgcggtagagaaagcaaaaaagcaatccggcgtaaatctggatacgcataaaatcaacatcaactacataagggaaatcagatgatgctaactgtgattattgctcttttaatgctttttataggttatcacgtcggagcggctcaccttgtagagcgactttcaaagcgggtacatgaaggcacctttgctgccatgatgtacaataagaaaacggcacgttgggaaaaaattggcgatccggatggtatcgcaaaacgaattgctttttcgccgcttccgtatgttgactgtgagctatttgtgaaactacagaagacgctgaatcggcgaaacaaactgatatgacaaaagaacccgcttcggcgggtttttttatgcccgcgatctgatatactcgcaaatcaacacagaaggaggattacaa

SEQ ID NO: 245 - DNA, 49466 bp, synthetic construct
  source 1..49466: mol_type = other DNA
atgtctgaagaacgtagaaaacgcgtaacgaaatcgcactttgcaggcaactttaaagcgctatatgaaaaggagttcggcgtggtgctagggcgcacggcagagatgacgccggaacaattttttgatatcgcaaagcgttacttccagtgggccgaagataacgcaatcaaggctgcggagacggcaacgtttcagggcgacgttaacgagtggggagtgaacaagcctcgaatttttacgctaacagggttaagcctgttttgcggcgtgaaccagtcaacgcttacacgctatcgccacgatcctaactatgctcccgtcatggagttcatcgactccgtgatctatgagcagaaatttcagcttgctgccgtcggcatgattaacgcttctttcgtcggaaaagagatggggatcgataagccaccagtgctgaacatcgacgctatcgccggggataagaacgagatcaccgaagagaggttagagaaggcagtgaccaatattcttgataagctgtaagggtcagatatgaacgaaatgatcatttgggaagacctgtcgccagccgataagctggcaattaaggcgcttagtacgcgcaacttttcgctattcatgaagatctggtttcagatcatccagggagaaaagctgatgtggaactggcatcactcctacttttgccacacggttgatgaaattatcgccgggaagcgcaagagcacgatcgttaacgttgcgccaggctccacaaagacggaggcgttctcaatccacctcgcgccgtatgcgtatcttaaatgccggaaggttcgaaaccttcagatctcgcagggtgacgcgctgtcaaaaggcaactccgatcgcgtgattaagatcttctcatctaacgagtggcaggagctatggccatcaaagttcgggcgcaagcagatcgatgaatttcaggtcatggacgataacgaccgcgtaaggctggaaatggtctcccgttcgtccggcggtcagatcgtcggtaagcgtggcgggtacatgacgccaggtttcagcggccttatcgcgctggatgatatcgacaaaccggatgatatgttctcgaaggtgaagcgtgagaaaaaccacgtactcctgaagaacaccattcgatcccgtcgagcgaagaagaagaaaggagacgaaacgccgatcctttccgtgcagcagcgattgcacgcgcaggattccacctggttcatgatgagcggcggcatggccatcgacttcgatcggattgttatcccggcgatggtaacgcgggaatatggcgaatcactccctgactggttgcgacctgagttcgagcgcgacgtgctttccggcccgtcggtggtaattgacggcgtggaatactggtcattttgggaggaaaacgaatcgatcgagaacctggttgcgctacgcgaagccgatctttatacgttcctttcgcagtatcagcaggaaccgatcgccctgggtggcaacgtgttcaagtcggagtggtggcgctattacggcgattccgacaaggcgcacgagccgcgcccggacaagttcgaatatacgttcatcacggcggacaccgcgcagaaggtcaaggagctaaacgactactctgtaatgtgctattggggcaagtatcgggatcgcgtctacttcattgacggaattcgcggaaaatgggaagcgccagatctccgcgttcaggccgaagcattcatcaagcagtgctggcgtcggaacaaggagtgcggaaaccttcgccggatctacatcgaagacaaggcgagcggtacaggtctaatccaggatttaacgaaggcggtaaacggcatgggcgagatcgtcccggtgcagcgcgataaagataaggtcactcgcgctatggatgcacaaccaatcatcaagggtgggcgtgtcgtgctgccggacaatcacccattcgttgcagagcttgaggcggagatgagcgcgtttacatatgacgattctcatccacacgatgatatttgcgacaacgtgtttgacgccgcaaacctggaaatgaacctgagcgacgatccggtagagcgaatgaaacgccttgcgggattgaaaaagctgggtcgctaatacataatgtgggcctgacggcccacacttaaacaaggttgaaatatgaataacattaagatggacgactataatcaaatctttaatggtggcgctggttatgcgtcaaccctcgcgtctatcgcggcaagatttggaacaatgtcgcaggttgaagagttctatcatgaaaacggcatggcgaagaaaatcgttgacgtgatcccggaagagatggtcgctcccggcttccagctaaacggcatttcagataacaccaagtttcaatctgaatgggacgggttaaatctggagccgcaaatcaccgatgctctttgctgggctaggctgtatggtggctcctacgtcctggcgatggttaacgatggtcgcgcattgacttcggcagcgaagcggggtaagccactcgaatctatcgttgtttacgaccatgattccgtttccgtcgcagaggaggaaaccagtccgcgaagcccacgattcggaaagcctaaaatgtacgaggtgaagccgctaaacggcgggcaaccgttcaaggtgcattatacccgtatgcactacatcgacggcgagcgcgtaaccaacaaggtgcgcaagctaaataatggcgctggtggctcggtgctgaacaagtcgattattgaagcgattcttgattacgactattcggaatatctggcgacgcaactactgaagcgcaagcagcagggcgtttggaaggcgaaaggcctggcgctaatctgcgacgacaaagaaggcgagtacgccgcccggttgcgcatggcgcaggttgatgctaattccggcgtcggaaacacgatcggtattgatgcggacgacgaagagtacaccgttatcaactccgatatttcaggcatcccggaattcctttccgcgaaaatggatcggattgtcgccctgtcaggcattcacgagatcgtgctaaaaaacaaaaacactggtggcgtaagtgcaagccagaacacggcgctacagacgttctacaaactggttgaccgcaagcgcaatgacgattacaagccgctgttagaattcctgttacagttcatcgtaacggaggatgaatacagcgtcgagttcgaaccgttgtcgctgcctaccgatgcggagaaagcggatatcttccagaagaacgccaacgcggctcgcagcctcgttaccgaccaggttattgacgccaacgaagcgcgtgatactctgtcggcgttgattcctgaactgaagctaaaaggcaacgctccgaagcagaaaaaacttccggatcgcgccgctggttcaggcagcacgcaaagcgcagagatcttaaacaacacggaggcggatgatgaaagttaacggcagaatcccaaactggcgttatcctgaagcaagcgagcgggagttatcccgctcaatgcaggacgcggtgacagaactcgtggtagaaatgcgggatcgcttagaccgccttaaatttgacgccacggctgaggaaatcagccaggcggaagacgatatcagcgaatctgccatcgtgttcttttccgccgtaattgcggcgctttcctccattgggttgactatctatagattcaattctaaacagtggcttgcaattgcgatcgcggctggcgggcggaacaacgaatcagttatgcgccttaaagaattcggtgctggtgggtatgaagactggtatcaggaatcgctaaataagtggcaggattacgccgaagcgtcaatcaggaagttagcaagcgatatagttgctgactggacaacgaaagttagaaccgccaacaacattggcaagtctcgcaagcagatcgatgaaatcatcgaaggtcgatacgctatctatggtagttggtcgcgcaaccgggcaagcggaatcatcggaacttttaacagtatgttgatgatgcagcgcctaaaagatgctaaagtatcgcattacttttggttcgggatgatggacgaccgcgagcgcgagagccatatcaagctagaaggtaagcgacgccccgttaatggtgacggaatcttccccggcgaagaatacggttgcaggtgctgggcggttccgtcatttgataatgaggatgattgatggttaactttaatgattactttaatcacgtaggaaaggatctgatatggaagcgagcaacatcaaaccgcgtaaaagttggtgatgttgccgggtggaaagatgagcatgggtatgtatacattagattcatgggcaaactgcgacaagctcaccggatcatttgggaaatgcaccacggcccaataccagaaggaatggaaatcgatcatattaaccatgtaacggacgataacaggatcgagaatttaaggcttgtaaccagaaaggaaaactgtaaaaacgtatcaatgagcgtaacaaataagagtggagttgtaggcgtgagttggtgcaagagaacaggtaaatggtttgcatccataagggttgataaaaaagagcgattcttaggtagatacgaagacaaaaacgaagccatttcagcaagaaaggcggcagaggcaaaatacaatttccataaaaatcacggagataaaaaatgaaaagagttcaaaggttcgacacggtaaagatgaaggccagattcgatgagaacggctttctggttgatactccgatcgtggcgcgtatcggtgcgcagacgtaccagacgccaaccgggcagcgcgtcgagttccgcccgcgttcggaggtgttcgatgctgaatcgctggcttcataccagggcaagccgatcactttgggtcacaagatggtgaacgcgcagaacgcaaaaggccttgtcgttggctcgtgctccggcgctggcaaagaagatgggattggtgttcttgttccggtgatgatttacgacggcgagtcaatcgagcaagccaaaaagcgcgtagctgctgagttatcagtgggctacacttcggtcgatatcgatcgcaaaggttggggtaataacgcaactggcgaatattatttcgatgaagaccttccggaaaacttcgaagagatgaaaaatgattccgtctctgattgggttcgctttgatgcagtgcagacgaagattcgcgtgaaccacgtagcgctcgttttccgtgggcgtgccgggattgcgaaattaaatcttgatagcgaacaagaattcccctatgatgacgactcaaaccacaaaggagctaaaacaatgatcattaaaattgacggcgtagatgttgaagtagcagataacgttggcgcttacattgcaaaactcgacgcgcaagttgcatcggcaaccagtcaggtaacgagcatcaccgcagagcgtgacgcacttcagaccaaagttgatggcattgaagatgaagtcgccgcccgcgttgctaaaatcaaagccgacgaagacgcaaagcagaaagttatcgcggttgtttctgccgctggcgtcaagtgtgacggcctggatgttaaggcaatgaaagttgcttacatcaaagaggttgacggtcgtgatctgtctgataaagaagattcgtacatcgacgcttcttttgactttatcgccaactctgataagatggctggcaatcgctccaaagtcttcggcaaaaaagaagatggcgagcaaaaagacaaaggcggcttaccgaaacttgacggcaccgaaatcatcgatccgcaggcaaaattccgccgctaataatttgcggccttcgggccgctaccagaccaaataaacaggagattcaaaatggcacagattccagcttcttattcccgcaagcgtgatattgccgtagcggggcagatcgctgatacgtcgctttataatatcgacggcacttgcgttgctgaaggcgatatcaaggctggcgtactggtggcttccactggcgtagtttccaatggccataaggtcgttaagccagcgaaagcagcgagcgacgtcattgtaggcatcgcgcagttctcgcaagcctactcgcctgaaggcaagtatgacgatgagagcgcggttaacgttatgactcatggccgcatttgggcgatcgcggacgcaactgttactgaagcagattgcgtgtttgattctttcgccacctttaccgcaaacggcaccgtagcgaagggtgatgccggggttatcaaaactggctacaaacacactggcgaatacaccaagaacgcagatggcaccgttctggtgaaagtgcaggtgcttcagggcgccgttgctccagcggctgcaactggcggcgctggcgtataaaataaggggcttcggccccatttttgcaccagaaaaaaacctttgacggcttaacgattcgtgatattcttcatctcgttaagccaaatacacaaacaggagtttttcagatgactatgaaattagatgcattcgaacagagtgcaattaaggtcgcaatgcagggcatgggcgtcgatgccgcaaaactggatgcttacggtatctggactgttaagcagatgactcaattactgaatcgccagtatgagcaggcatacccgcagaccagcgcacttgagcttttcccggtaactaccgagatctcgccgaccgcccgccgctttgagtggctcgaattcgacggcgtaacctctgcgaaaatcatcgccgattacaccgacgatctgccgaccgttgaagcgatggcaaaagagaagtcagggaaagttttccgcctgggtaacgcgtggtttatttccatcgacgaaattaaaactggtgcagcgctgggttcaagcctgagcgatcgaaaagcaaccctggcccgcgaaggtcatgagacgctcgtaaacgatctggtgttcaaaggctccactcctcacggtatcgtgagcattttcgaccagccgaacattaaccgcatgaccgccagtgctgcatggggcaatgattcagcggcggctgaaaaggcattcgaagatctggaagacctgcttaacatgatcgaagaaaccacgctgggccgccatcacgcgaccaacatcgtgattcctccgtctaagcgtcgtcttctgacgaaaaagatgccggacactagcggcgactcttatctgacttggttcaccaagaaccacccgaacatcaccattacggcgatggcggagttggaagatattgacggcgcaggcaccaaaggcgtgctggcatacgaaaaagacccaatgaacatgagcatcgagatccctgagcggttcaacatgctgccgatgcagccgaaagacctgcatttcaaagttccgtgcacctccaaatgcactggtctcatcgtgtaccgcccgctgactattgcgattctcaccgggatttaatcaaaagcgccttcgggcgcttttttattgcattgcattctgcaatgtgctttaatttgaaacctaaagtaaaccaatggagcattaacaatggccagtaaaaaagaaaccgtagaaaccgtagaaaccgcagaaatcaccagcgaagaacagacgccgcaggttgttcaactgcaaaacgttggtgcatgtgcaattcgctataaaggcacaaattacgtctatgagcaggttttcgaagtgccagaaagcgagatcgaccgattccgccacgaaatcttcaaaggccgcgtcgagttctacgacaatcctaaacgcacgcgcgaatacatcgcagcggtaaaggcgacagcgaaagagatcgtgcagcctaaaagcgcggaataacaaaaaccaacaaagggcgcttcggcgtcctttttcatatcaggagagcaaccatgaattacacaattcaagatgtgatcgataaaatgcgcagccttgcacctccgcttaaagaagttccagatgaactgctgtctgcatgggttgtgcttgccgaagaattcgtttgcaaatcccggttcggagactccatcgttacggcgatcgcgttgatgaccatgcatctaatgtttttggacggcgcaatgaagcaggaaggcgaaagcctggaatcttacacgcagcgagtggcgtcgttcaccctgaccggggagttttcccaaaccttcgatcgcgtgtcggcgtcaagtgataacgaaatgctttctacgccgtggggcaaaatgtactggcgtatgctcaagatgcgcggcggcggcttcggcctgcttaccgccgggaacgtgcgccgctgcggaatggttaggtgatcgctatgaactacaaagcaatccaggcacgcgcaagcgctggcattaaattcttcagcgacgctggcggcgtgttcaacaagtacacgaaaggcgctggcggaggaatcgatccggaaaccggggaagatatcattcctggcgaggtggtgacgacaatcaagggagcgatcagggatgttaatgaccgtgacattaacggcgaaaccatccttgctggcgataagcgcggttttttcactcatgatgtgccaatcatggaaggtgacgaaatcgaagtagacggagagcgctaccgcgtggttaatgcccgcccggtaaaaccaacgggaaccgtcgttgcctaccgtccagttttgcgcagggtggcgacttatggctaattacactatccgcgaattcacaggcgcaattgatgcgtggtgtaaggccgctggtgatgcgctggaggacgttgtaaggtttacgtgtgaagatattcaccgcgaccttgtaatgcgttctccggttgatacagggcgcttccgtggtaactggcaaatcacctttaaccgcgccccgctttacgcgattaacgcatacgaccaaactggcgaaaagacaatccagaacggcaaagccaacattgcactatacgcaaaaggggccgggatcacttcgatctggttcagtaacatgctaatctatgcgaacgcgctggaatacggccattcaaagcaggctcccaatggcgttatgggcgttgttgcgatccggttgggcgtttatgttactgaggcaatcaagcgagcgagggcgaaaaatgcattatgatatggcgttaaaatgcaaggcggcagtggctaaatttgccgccgagaacgggttgagggtcgcgggggataacgttgactttatcccaccgagaggcggggaaacctaccttaaagtctcctacgtcgaggcggattcaagatcggttgacctgtcaaggaaatgccgagtctatctggcgatggttcagattgacgttatctttaagcctggaatcggaaccgatcgagcgaggattatcgcccaacgcgttgcaaaatccttccctgaaggaaagattgttgatcgtgacggtaagttatatgtgagcgagtgggcggaggtacacggcgtgcagaagcacgaaacgggttggttcttcccggttcggttcacagtaagatgcgaccgcacggaggagagcggctatccatccaactagcggaacctcacgtcgcttataatttcttgccagcctggaaatatgtaggcataatggcggtgtaaaactttcattcaaacaggagtattcaacatgcatttaccaaacggtgctaaggtcttctttgagaaggctcgcggtgcgaagattccgtttaccgcaatgaccaacgacgcgaaaaacccaaaaatcacggtggcagatggcaagctgaaggtgaaagatattgtgatcttcaccgattgcacctgggacgacttcgttaacaaggtggctcgcgtaaaagcagtgacagcaggcgtggcaacgctggaagagttcgacacctccgacactaacaagtatcctggcggcgcggctactggtaacgtaagcgtgatcactgattgggtggaattgccttgcattcaggatttaggcaaagatggcaacgaacagcagttctataactatcagtgcttgagcgatgagcgcgaacaatccgaacctacttacaagtcggcagtgacgcttaactacacgtttgcgcacgattacagtaacgcgatctaccctgtgttgcgttcagccgacgccagcaagcaggcgagagcgatgtacatgtatatcccgcgagcttccgaggttcgttactggtctggaattgcatctttcgatgacattccttccacggctgttaacgagatggaaacggtaacgcttaacattgcgcttaaaggtgctcacgtcttccttccggttgccgtgtaattaaatggcggggcttgtgcctcgcctttttttgtgcataatagcgaataacacaaaccaatcaggagttaacaaaatggctaaattcaaaattcaaatcggcggcaatctcccttctttcaagctgcctgtaaccttcacttgccccgacggcaaagaagcaaccatcaccatgacagtaaaacatcgttcaaccgatgagatgaaagacttttatgagagcgaagataaagcgccaaagggtaacgccgagtttatccgcttcatggctgaaggttgggatctggatgacgaattcagcgatgaaaacatttcctggctttgcgctcacttcccggcgttcgtcatggcactgccacaaacttacatggccgcgctggcgggccaccgtgcaaaagtttaaggcgggctgtttatctcacgcttcagcctgagctaaccgatcgccagcttgcggagtacgggttaaggcgatcggattatgaagcagatcttgaaacgatctactttgatgaacagaccgcccaaagctggcagctattccaggccatgcaaacgcagtggcgaatcgggatgaatggcccgacggggcttgactataatacgttgcctatgctgttcgaattgtataaaatcgacaatcgagaagcggcattacttgacttgcaaatccttgagggtgaatacctgaaggagatttacaagaaatccaaataagcgcctactggcgcttttttcatatgggggcgaaacatggctgataaagtagctgggctaacgtttggcgttgacgtgtcgcaggttgataaagcggtacgatcactcgcagaactgaaaaaccaaagccagcaaacgggcgctggcctacagtcacttgctgacgctgaaaggcgggccacggcgcagaccgaggaaatgaaccgcgcattgcagcgccagaagcaagagactgacaaatcaaaaaccagctttagcaggatcgcaagcgccatcgatcccacgatcacaaaaatggccaacttgcgcaaagcgacggaagaacttgataaagcgtgggcgcttgggcttgttcctgacaaggaatttttccgcctgggagccatcattgaatccacaaccaacaatctacggcggcagcaggcggcgctaaccgaagaaggtcgcgcagcaatcgcagaggcggaggcaaagcagaaggcggcaaatgccgggcgtgattttgtcgccagcctgaaacagcaggctgactccatcggaaaaacacgcgccgaactgctggaaatgaaggcggcgcaattgggcgtatcggcagaagcggccccgttcattaacgcgctgaaacagcaagagcaggcgttaaagaaacagcaaaacgctatgggcctggctggcatttctgccgggcaatataaaatggccatgcgccagttaccgatgcagatcacggatattgtaacttcccttgcgtcaggtatgccagtctggctggttgcggtgcagcagggcgggcaaatcaaggacagcttcggaggcttgagcaatacgtttaaggtgttgttgagctacatcaacccgctaacggttggtgctgcgtcgttgggtatcgccctggcggcaatcgctaaagctggttatgactcctggagtgcgcaacgagaactggcgaatgcgctggtgctgactggtggctatgctgcgaccacaaccgggcagatcacagccttaaccgaagagattaacaaaaactcatcggccacgattggcagcattcaggaaatcgcaacatcgctcgccagttctggtaagtacaccatcaaccagattaagcagatcacgaagactacggcggaatggtcggcgcagacgggggagagcgagaagacgatcacagggtattttgatgccatcgtaaaagaccctgttaaggggcttgccgatctcaatgagcgttttaattttctgaaagagggccagctaacctacatcgaatctttgcgtaaaacaaaaggcgagacggcagcagcagatgcggcgacaaaactgtttgctgatactatggataagcgccttaaagatatcgcggacagtgcaacgccactcgaaacgatgtggatggatattaaaaaatgggcggctgactcgtggaagtgggtaggcgatcacacggtaggggcgctaaaccttatcgttgacacggtttccgcaatcatcaacacgatcagaaagctgattgccgacggcgacgccatgatcgcgcagttcatcgttgacgctggccgacagctacagaagatccccggcatgggagactttgggaatgactttctggcgcagcaggagcagttaatcaaggactcgaaagccaaatccgccgagcttgcaaaaaccattgcggaacagcaggcaaggatcgcaaaaggcgagatgggttacattgacgccgcgaaggataaaaccctttccggtgggtacagcagcaaaacgaaggatcgcgtaaatcaggaagaaaaagatatcctgaaaaaccgcaacgccaggaagcagcaggtagacgcgggcgttaaaattgatgagcagtatcaggctgaactgctatcgctacaggcgcagttaaaggttttgcagcagcacaaagggcttgatgacaagatcagccagcagcgcaaagactacttcgagacggttgctaaattccaggttttggaagaggcaagccagaagcgaaaactgacccaaagcgaacagcagatgctggcgaacaaaaagaatatcctgtacatggcggagcaaaaggccatcgtgggagatcagattgttcagcagcagagattgaacgccttgcttgacaagtcgaccaagtatcaaaaccagatggcggagaaaaccaaagcgctacaggataccgccggaatgggtagcaaggagcaggagagataccgggccaatgcgcaaatggcggctgactggaaaaacaacggcggatctttaagtgaccctggatttaaagcgatgcaggccgcaagcgataaattctacgcacagcaagatgcgcaaatgatgaactggaaggccgggttcactcatgcgtgggctgatattggcgacgaagttaatgacgtatacaccaacatcggggatatcactaaaaacacatttaacggcatggcgagcgtgctgactgattttgtaatgactggtaaagccagctttagcgactttgcaaagagcgtgatcactgacattaccaacatgcttatcaagatggcgctgtttaactcgctttctgccgcgtttggtggtggcggcacgttcagcttcgccaacatgttcagcaagggattttctggtggtggctacactggcgacggcgggaagtatgaaccaaaaggcgttgttcacggcggggaattcgtattcacgaaggaggctacgcaaaggttaggcccggaaaacctgtaccgactcatgcgcggctatgcaagtggcggcctggttggtggtaacgcaagttccggatctggaatcaccaacggcggcaacgtcgcagcgtcggcggctatggtgttcactatcggtgacattaacattacgatgggttccggtcaggatagtaaggggatggagcagggcgtaaggcagatcgtgaacgatatgttcaccgaggctttgagccaaaacgggcgcattgcgaagttcgtcaatgagaaaacgaggaggtagtagtggattcctttaaatggtgtacacaaatccaaggaggggcggcgaaagtcgccgtatccaataacgttcgggcgatcagcttcggaaatggctacatccaaactgcgtcgagcggcattaacacaaagcgccggactgttccgatcgtttatggcggttcggattgggaagcggtttataacttctgtcaggatcacgtaacaaagccttttgtgtggaaggcaccggatggaagaatgggcgtgttcgtcgtaactgccgactccgttaaccttgcgccgcagggtggcggggtgtttgaggtaacggctgaattcgccgaacgcttcacttcagccggataatcaaaaagcgccctttacgggtgcttttttttggcctatgatctggagtcaattagaggagggcttacgatgacagccaatgtttcaaaagattttgcgaactgcctacaaaaacttttccccggcgagatcctaacgctgatcgatatcgacgccacaaagttcggcgggcaggtctaccgattccataacgagaacgtcgcctatacaaccgaggagcttttggccgcggttaacggcgggacgcttcagccaaagatgatcacgtttcgcggcgagcagtacggcccgcgaccgttcggcctgggcgggatcgcaatgtcgagcgatggcacagtggaaaagccaacgctgacggttagcaatattgatgcgcaagcgagtgctcttattcgagcctataacggccttatgcaagccaaagttacggtatgggttttggtcaaggaattgctacaaaacgacggcagcgttaaagagggcgattttaggcgatttatttactacatcgagcgcccaaaacaggtcgacccgcaaaaggcaacgttcgaattaacatccgtgtttgatatggatggattaatgatcccggcccgtctgacgcaaaccgtttgctattgggcgcagcgtgggtggtacaagtctggcaaaggctgcgactacaacgggcagaacggatacttcgacaagttgggaaacagggttgaagacccgtcgcaagatgtttgtggcggcttggtttcttcttgcaggcttcgttttggcaatgaaccgttgagttttggcggttgtgcgacagcaacattgaaaagtggaaggtaatatgttaactccgaaaatcaaaatgcagatcatgcagcacgcgaaagaagtttacccgcatgagtgcgcaggtctggtgacgcaaaaatcacgagtgcaaaaatatcaccgactcgacaacgtttcgccagatcctgagaaagaatcaatgcctgatgaaacgcagtatgcgctggcatcaatggagggcgagccgatcgccttcgttcactcccacactggcgatggggcaaccacaattccgagcgccactgatttatgcttttgcgatgagtctggcttgtcgtgggttatcgtctccatcccggaaggtgatatgcgaatcattgagccgaaacgccgacctctgattggtcgcccctgggctttgggcgcttacgattgctatggcctaatcatggattttcacaagcgccacggcgtcacactaaaagatcggcgattgccgttcgaatggtggaagccggaatacaaagagaatctttaccaggattactggcaagaggacggattcattgaaaacactggcgagcctgaagttggcgatatgatcatcttccagattcaggcggaaaagtggaatcacgctggtatttacgttggaaacaataacatccttcatcacgcgtttggcaagctgtctcgcagggatatctattctggatggtacgagcagcacaaggttttaatttgcaggcacaaggagcttaaacatggcatcacatacaaagacgattaaactatccggttccctggggcgtcggttcggtgtcttccacaaacttgcggttgattcagtcgctgaatgcatccgggcgctgtcttaccaggttgaggggtttaagcctttcatgcagagcaaggttggtttaaatatgcgcttcggcgttgtcgccgacggaaaaccaatcagcgcgaacgaccttgcgacttttgccgtggcgagggagatcagaatcattccgatcccaaaagccagaaagaacggcgggttgttgcaggtcgttatcggagcggcgattatggttgcggccttctttactggcggcggctcgctggcggctatgggcgctttttcatcggctgcattcatggctggcggctcaatggttttgggtggcgtaatgcagatgatcgcaccgcagatgggcggcaatatgcgggcgagcgaatcgcctgagaataagccatcgtatgcgttcggcgggccgattaacaccacggcggcaggttatccaatccagttgccatacggttacagattggctggcggcgcattgttcggttctggatcttacgcagaagacaacaactaattaagccattcgctttttagcctgggggcgtagcctccgggctttttgtcgtgtacaattgcgagactattaacaggaggctaaacgatgactaatatcaaggcccgtaagggaggctcaagcaagccgcgtaccccggtagaaatgccagataacctgatctcaaaagacaagatcaagttattgctggctgtttctgatggcgaggtcgttaacgacttcagtttgaagcagttgcatttcggcggcgtcccggttcaaaacgaagatggaagttacaactatgaaggcgtgattgctgagtttcgccccggcacgcaaacacaggactacatccagggcttcagcgaatcaagtgctgagttccaggttgctcgtgaagtcactcacaacacgccttatacgcttaccgtatcgaacaaaaatctgtctgctattcgctttcgcctgttatggccgcgcgtgctgactcaaaaagataacggcgatatggtcggatcggttgttgagtacaagatcgagatggcggtagatggcgcaagttatcagacctacctaactggcaaaattgacggaaagaacacgactggcggttacgatcggagcattcgcgttaacctgccgcaaaacttcacgtcgcaggttcttatccgcgtgagccgagtaacgccggatgctgacggggtgaaggttgtcgatgccttccaggttcaatcctacgctgaggtcattgatgcaaaattccgctacccgttaacggccatgctttacgttgagttcgatagcgacctgttccagaaccagatcccaaccatctcactcaaaaagaaatggaaaattattcaggttccgagtaattacgatccgattaatcgcacatactccgggacgtgggacggtgtttttaagtgggcgtggagcaataacccggcatgggtgctttatgacctgatcatgaatcagcgctatggtttagaccagcgtgagttaggaatcccggttgataagtggtcgctgtatgaggtggcgcaatactgtgatgaacttgttcctgataatcgcggcgggatggaaccgcgctatttgatggatgtaattgttcaatcgcaggttgaggcgttccagttggtaagggatatttgttccgcgttccgtggaatgacgttctacaacggggaaagcctttcgattatcgtcgataagccgcgcgatccggtgtacctgtttacggctgataacgtcgttgatggcgttttcgttcggacgttcccaagcgaaaagacgatgtacacgtcgtgcaacgtcatgttcgacgacgaagaaaaccagtacgaacaggatgttgaaccagtattcaaccctgacgcagccatgcggttcggccacaacccgaccagcattacagcgatcggatgtaccagaaggacagaggcgaaccgccgtggtcgctggattctgcaaacgaacctaagcgccacaaccgtttcgttttctactggcctggaaggtatgattccttcttgcggcgatgtgatttacgttgcagatccgcattggcaatcggcctttaacctggtgctatcaggccgcgttatggaagtgtctggcgtgcaggtgttccttgcctaccgctgcgacgcgaaggctggcgacactctgatcctgaatacagacgacggcaagccagtgcgccgcacaatcgccagcgtttcggcggacggtaagaccatcacgctaaatgttgggtataactttgacgttgcgcctgacagcgtattcctgatcgagagcgatcagcttgcagcggaacagtatgtagtaacccggattgaaaagggtagtgatgacgacgaatttactttcgccatcacggctacgcagtacgatccgaacaagtatgacgcgatcgataacggggtaattaccgatggccgaccaacttcggttgtcgaccctgattcaatgggcgcaccgaaagacttaacgattagctctttctcccgcattgttcaggggatgagcgtcgagacgatggttatcggatggtctgccgtgcagtatgcaaaactgtacgaggtgcaatggcgcaaggacggtggtaactggaacaacgttccgcgcactgcgacaacgcaggttgatatcgaaggcatctatgctggcgagtatcaggcccgcgtgaggtgcattagcggtgggaatgtagcgtctccgtggtctgaattggcaaccgccacactgaccgggaaagtcggagcgccaaaaggcccgattaacctgtttgcgtcggacaatgagatcttcggcattcgagttaagtgggctatgccggaaggagcggaagacacggcatacattgagctttaccagtcgcaaagcggaaccgatcaggacgcaagcctgcttactctgattccttacccggcggctgaatactggcactcaattttgcccgctggctacgtgaacttctacaaagccagaagcgtagaccggatcggcaatgtttcagaatggactgattacgctcgcggcatgtcgtcgactgacgttaacatcatcacagatgcgatcctggatgaaatcctggatagcgacgcgatgaaggaactacaggaaaacgcacaggatagcgcggcaaaactcaatgactacgcgaacagcatcattcaaaatgcgctggcgaatgatgcggacgttaggaaaatgacgaaggagaacggtaagcgtaaggcagagatcgcgcataccacggtgctgattgccaacgaatcagaagcgagggcggctgaaattacgcaacttaaagcgcagattgatgaagatatcacgtcgcagattacgatccttaacgaagccctggcgacggaaagcgagacgagagcaacgcagattggtcagttgcaggcagattttgcggctgatattgacggcgtaaaaacaacaatgaacgctggttttacgcaggttaatcaggctattgcaaatgaaagtgacgcgcgtgcaagttccgaggcggcactagatgccaaaatcgggcagaactccgcagcgctaaaccagaaactcgactcgtgggcgaacgttaatggcgtcggttccatgtacacgatgaagttgggcttgaggtacaacggtcaggagtatagctccgggatggccctacagcttacctcaagtggtggaagcgttgtttcgcaggtgctgttcattgctgatagatttgctatcatccgtaatgcggcgtctggcgcgtacacgctaccgtttgttgtgcagaatgaccaagtgttcatgaataacgcgcttattcaggacggttcgattaccaacgcgaagatcggtaacgtcattcagtccaacaactttcaggagaatgttgcaggatggaggcttgataaaaacggcgtatttgtcaactatggctcaacttctggcgaaggttccatcaagcaaacgaaccagaacatcactgttcgagatggtagcgggcgcgttcgttgccagttgggtaggatcactggatcatggtaaaattaatgccgggagaaatcccggcttaaccaaaggaggcagacaatggcttatggttttcaatcatgggatgcgaacgggaaccccaacaactatgggatcgtccctgtttcagttgctggatatattgcattagcgcaaggccagaaaagcggaacgtggtattacaacgtcccgcctgggttgaggcttggtttcttttgggtcgcaaatcaagaccagtacggcacatcgaagaggcgaattaccgttagtggtaatcagatcgttgtttcagatgcgccagatgatgcgctggaatcaggcgtctacccggcgacgcaaggttttattgtcgttcaaattatgagttgatgattatggcagattacggaattttacttaccaatgatagcggcaatgtttgggtttcgcctcaaagcatcccactggcactactatcaaagcagagcatcactcttaggggtggtactaactccgatgaagtaagatcggtaacttacgacacgaatcacccatgcgttccgttcgtggtctttcatggatcttcgccacaaggtgcattcacaaaaatcaagtacagcggaaacacttgcagcgttgttttttcttttggtaagcaaaacgtatatgcggaggtttattttttctccgtgttcccacagccaaatcctggttatgggcttgcaatttgggatgaaaacggcacgctgattttgaccaatgaaaccagaacactttcagacgtacagacctacggcactggttttaatctaaacgtcactaacggcgggaagtgggcggttagtcctgttcagttaggcgcgatcgttggtgttgttcgcgatccctacccaagaccatttcagggcgactattgcgcagcggcattctttaacggctcaagcacgcaacttaccgcatatctaacgcaggcaccaggaggagccgccagcgatctaacctacgtcaatatgaaaaacacctgcatcgctattgattgcgcaagatacgactaaaagaaaggggccatacggcccctttttctaccccttgagatttttgatctcctcttttaattcatcaacttgagcagacagagctttgattgcgcaaattgcatccatcaaaagagcattattgtcaagcacaagtttcttattttcaactacgttaccctcatcatcctgataggatgcgctgctttctttaacgtagcacgaatcgatatctcgcacctgctgtgcaataactcccctacgctcgcgtttcttaacatcatccttataggtgaacttgaccagattcattgctttgatgttttcgagtgactgcaaaccatcataagcaacaacattgtctttgtagttaatgtcagatagaccagcaaaaacaacgttgccataagcagtgcttgcaatattaccatctgatttaaactgccaatactgcgtattaccgccagttccccatttgctgacctcaataacggcacgatgttcataacccctatgttcctcaagccacatagcgcaacgcgcaccgttaccattaatgttgaaccgtgagataaatgatggagatttaaggatatcaccattattcccatttggatcgctagttggccacgctacaaaagcatcattaacggtactcctcacagtcccatatgacacaacacttccgcgaagatcggcagccccgccaactcgcaacgtgctcgacattgtaacagcgccgcgaagatcggcagccccgtcagcacgcaacgtgcttgacattgtaacagcattgctaaagtttgcattcaacccggtaacagcaaagttcgatgcatcaaaaacaacctgcttcgcgctgttcatatctccattagggcggaagtacattccttgaccattttcagggattgagtacacgatcgcattgctgttatttgccctaatagtgcaaccgttcagggtcagcgtggcgtttcctccaggaacgctaattgcctgcggctggctgaacgtgttagctacgttggtgcgcgggatcgtattatcattagccatcaaatagtcagacggtgaattatatacaattccagaaggctccgtgtcaatccaggtataaccagtgcgatcaatgattggccccgtaatcgaccctttgttagcctgtacgtttacatgattcaaccacagttcaggaacccatccgccgggagcatgaatataaacatcaaacgaggagtctgtgtttttcaccaccccaagattaatgcgtctggtgtcgtttggtctggcagcaatcagggtgcgctgagtaaaccaagtgtcaatattattactggttagcgtatcgggaagaccgcggccagaaatcgaaaagatatcaaccgggagatttgcagtgccataaccagtacctccgccaatgatgaactgagcaaatgcgtagccatcaccagcgttcttgacgttggcgatcttcatccacttctccccagcgaaagtgccagtaattttatccggcacctggacgccagccacaaggtcgacaacctgatcacgaagattttgcgtctgccccttcgcagtttgcgcgtcgttcttcgccgagttggccgcagtttctgacgcttttgcattggtctccgaggttttggctgcggtttctgatgcctttgcattggtctccgagtttttggccgcagtttctgacgctttggcgttggtctctgaggtcttcgctgcggtttctgatgcctttgcgttagtctccgacgtcttcgcagcattcttggatgcagcagcattggtctctgaagtctttgcagcggtttctgatgcctttgcattggtctccgaggttttggccttattctccgaagatttagcgttcgtctctgaggtcttcgctgcggtttctgacgctttggcgttggtctctgaagtttttgcagcgctttcagacgcagccgcagccgtagcgcttgcgcccgcagcttcggaatctgccctcacctgatcggcaagactttgcagagcttcgaaatcgaagttcttaaagaagtcgacagcatccgcaatttgagtttcctgtgactggtagtagcgcagagtttccgcaacatcttgcgccagtccgtcaacggtcagcgagtcacttaacaggatcgcgtaatcgctagacgctacgacagcgccttttgtggtgatggctttaatttcagtatcgctaaccaccttgtttacgacggccatttgaattggtgacgacaaaaacataatcgtcgcaccagggcgaatcagcgaaagcgatgattgccattttgtgccagtcccggtaacggttccgtctgcggccatagccgctttgccttctctgtatagtgccatgtttttaagcctcattggttgattgagtaacgcagataatagcatcaatgaaccgataaaaaaaggagcctttcggctcctttagttgtcaaattagaacgggatatcatcatcgaaatccatccccgcattcccgccgctgttttgcggcttaggcgcttgttgcggcttgggttgttgaggctggccccacccggattgctgattgccgccgccgctttgcgaaggatcgcgctggctgaattcgagttgcggcataatcatttcgttgtggctgtaaattgtgccgttgtgctcgcggttaacgatctgaagcgtccggcaggttacgctgatcaccttatccatttgcagcgcttcgtcgtaccacttaatcatgttttcttttgcaaagaaaactgcgcggtagttcgtgtaaattgtttcgtcctcgccatcacgattgcggatcttcatccgctccgacaggtctacggcgtacattttccacggcccgttattgttgctgccctctttgacataaggcgcttttcggattacccctgttacaacatgcattgtcattcctatggggcggcttcccgcccgttaaattagttgaaagatgaaatatcttgcgcttctggttcaggttttgattctaccttttccggctcgcgcttcgcaacctcttgcggtttaccggggttaaatccgtttgccggggtgactttcagttctgcctggcgtttggtgatatcgtcttccgtcattttccactccgccggggttaacgtttgtttcgccagcttatagatctcacgaagcgattcgagatcttcgcacgcgtcaatgcgttttttgaagtctttcggtgtcattttcgtaatttctgcatcatcatccgcctgcttgatacctagcgctgcggccagcgcataacggcgggcgtaagatgttgttgagccgtatgcttgttcgacggttttactgatcggcatattgtactgaaacgccatgaactcgccgctttcatgcaaaaacatagtttcgaggtgcatcaccttttcggtgctcgtatccatcatggattgaatgaccataattttgttcttctccagcgccggggaaatagcgtcgaggatatccccaagattcgcataggtgttcccaagatggttgttcttaccgcttttctttgcggccacgaagccagattttgccttgattaatgcggctgcgatggtggtaaatttttcagatgtacgcatgataaagtttccttttcctaattggtaatgcgcactatatcacaagtgcgcaccagtgtttagctatttgtgccgtatacgtccgggaacatgtatttcacaaactgaggagtcggcaaaacaacttccgccgcgtttgactcatatgatggccatgaatcgtgcttcacgcattcagcatactgatgaatcacgctttgatactgtttgcgaccgatctcgatctgctggctggtcagggtgaacgccagcggagcaaacggtgattttttctcctgcgttagcagtctgacaactaccgggcgtttttcgttgtaagtcttcacgaacagatcgcgctgcaatgccatcttgagatagtagcccaagttgaaggcgagtcgcccgaaatcgtcaggcttggaagattgcgtggttttgtagtcggtaatcaccacgacctcgaaaacctcatccgggttgaacccccactccttgatgagttcgggatcggaaacaacgtcaacatgatcgagtcgaaccttaaccttgacgccgaagatctcaccgaagattgacaattcacgctgtgctgtaggcgattcgatacatgcggcgtgtcgcgggttagccagcatcacgctgcgcatttgaacaacggcatcgaaatcaacatccttaaccagcttgcgcccggagtttatcgcggcgctttcgtcgcacagttcaatagcccaccaaacatttacgtcaatcccggcgcgatatgccatttccagaagttccgggtaatccttgttggacgtcccaatcaggccacacgctttcagcttcgcagacagtgccgacttcgacgtaatcagatctttaacctcgcccggagaagtcgcccgcaggtactcgccattaaactttgccgtctcaagcatacaggtatgcgaacaggttccgaacgccagcgcggctgcttcctcacgcactttgaatttccagtgcgccggggatgttgcgtaaatctcgccgaggcttgagccgctaacgtattccgcgcaccaggagttaggatcgtggtaatcatcgttggataattccgcgttggtgtatgccttaaaaattgcttcagccattggtatcactccatttgtggtttcgttgcgttaagtatacgcatgacgattccaggcgcaagtcaaaaagtgctatccgcagttggttaaaaaacgagcgaaatttacgtaagatttagtaagatgcatcttacgtgatttttcctatatatttcatttagttaatgcaaatcggtaagatggtaatatccctataggtaaatatccatgaaaaatatggcgcgaaatccagcgaaaaaagacacgcaccccggagaaatcttaccaagattgatagatacagatagagtaataataataatattgttatttatcatatacttactatctatatattgcggttaattggttaaattttgcgcgaaatttacgtaagattcatcttactaaatcttacctaaagtggttcgaccagctgcaagccactgaatttcaggcataaaaaaaggtaagactgatttgctcaatcttacctaaattctggtcaacatttaatcatagaagcgacgatgccctgtacaacttgcgttcaaatccgagcttaaagttgtcaccgttcggaacgataactttaagatcccgatcgtcagcagccgccagcatatcccgatctccacgacggcaaactacccgcatttctcgcttaccttctccgccattgcctttatacctgtacgccacgatctcgacgtttgaaggtatgatgcaggcccaaacgtcgcacttgaacgaactggcaatattaaagtgcatcgcctcaatccaggatcgagcaaggtaaatcggcccgttaccgtcgtcgctctgattggtcactatcaccgatccgaatgtcagatcgccagccaacatcttctcccgaccctcctcatcaatgaacagcatgttgcaatactcatcatccggcccatcctcatgcactagttgcattggtagcgcgtgaattagctcctgtctgcagttctcgtgagtttttacgccaaccagatatgatttgatatgctcattttcaatgccctcatagagcgttacaggcgtgctatcgacggcctccgttctgtttaaaactgccatcactctttcatgatctgccatctttccgtagtcatacccgttatcacgagctacctgcttgtttctcttgactacgtattcttgcggaacctttccgagatagcgcccaagaatgttgatgcactcgctatacggctggccgcttaacttcattaaccagccgatccccttatcggcaccgcaaccgccacagtatgcgccgccatcacctcgcgtttccagcttgtcagtccagcggaatcggtctttgccgccgcagttcgggcagtcctggtgcttgccgttgaagtatcgagagtggatgccgcaaatgttctgcaacgcctcgcgccacatgccagccatgtacggcaaaacctctttttcatcgtaaaaatccacgtcgtaacccccaaataaaaaacgcctacacgagaatgataacccggcaggcgtttagtgtttagtcaaattgtgctatcggactacgcggagcatttcgcggcggtcgcatcggcgcgtcactggcttgccgttgctgtcaaatcttaaatcaggtcggcagaatgaggcgcgaaaacctttgcaattgttccgtcggtagctcttatgtactagataagcgccatcggctgagatcataccgcgcttacgccactgctgaacaacctggatactaactcccaactcttttgccgttccagcgataccaccgaaggcatcaataaccagctccatccgcgcagtcaacccagctcgaacctcatccttcagcacgtagtaaccagtcggtcgcttgcgtttcttcttatctttcccgcgcgacgttccgttgttgccgttcaaggttcgcttatcaaccattgccatttgctccataattcaaccctcatagcattttttgttaaacctgataaaatgttccatgtattatacacgcaactatgcgaatgacaaattaggattgacaatggcaagcacagaagaagacgtagcatattttaagcgactatttcgttatgaaggcggaacactgattcgcaaagttacaaccagtagtcgtgcattcgctggagactccgtagggtgcgagaacaacgttgggtatttacaggtaagcgtaaaaagcaaacccctatacgttcaccgaatcatttgggaaatgcataatgggcctatcccagaaggaatggagatagatcacatcaaccaggtcagaacagataacagaatcgaaaacctgcgactggtaagccaccaagtaaaccttaaaaaccaatcgatgaacagtggcaatactagcgggcacgctggcgtaagctggtttaagcgaggcggtaagtggagggcaacaataaaggttggcggaaggcaaatacacattggttacttcgcgtcgtttgagtcggcagttgccgcacgaaaagcagcagaaaaacaatatggttttcatgataaccacggagcagagaaaaagaaatgagcttatcgattgagcaacaaatagatctatacgcagacaaaatcccggcaatccaaaagagatttaccgttggaaatatcgttccgtatccatatcaggctgtggcttatattgagacagccaaaagaatagcaaactacaccgcaccgttttacattaaggcttcggtttccgccgggaaaaccatcatgatcgccatgctcgcagcgcagtgcaaggcaatgaacttacccatgatggttcttgctcgccaggccgagatcgtgaagcaggattccgaggagatcagtaacctcgacgttccaaactccgtttattgtgccgggttaggcacgaaggcggcatacttcccgatcgtcgtcggatctgaagggacggtggttaatggcctgtttaaaatgctgggcgactacgtgccttcagttctggctattgacgaatgccaccaggttgactggcaagatctggcggaagcgatcgccaacaatgaatcgttcgagtacatgagccgaccgaaggataagccgtatcgcgtgaacggggaactggtcgatgccgaccacccatacgacgaaaaattcgacgacgtagaattcggcggcggtcgcacgcagtacactatcgtcatttgtgagttaatgcggaggtgccttgagaagacagggcgagaacttcgcatcgttggctatactggttcggagtttcgcggcgtcattccgattttacaggaagacaagagccagcctggtttttggcgcgagcagatcaccgacattaacacaaactatcttgtcgagttcggatcggtggttccgacaatttttggtgatactgaatccgaagggttagggtatgacctatcagaattccacggttccagtcaggacggtacgcaggattttagcgcggaagaattgcgcaagatggaaaagaaaatccatgaatccggcgaaatgacgaagctgattatgcaaaaggtcgtggagcgtgcgaaaacccgaaacggagttctgataacttgcgctggacagcggcattgcaaggaggcggcgagctatctaccgccggacgcaacatacgcgatcatcaccgaaaagacgaactcaaagaaacgcggcgaaattttggataaggcgaatcgcggtgagatcaaatacatcttccaggtgatggccctaaccactggcgttaacgttccattttgggatttttctgtgatattgcgcaagatcgggtcgcttacgttgcttattcagcttttggggcgcggaatgcgacttctgaaggactggcaaaaacagccgccttactcgtgggtgaaagaagatcaccttgtctgggattttgccggaacaatggatgacctgggccagttgtatttcgatccgatcttggagcaggcgcaataccaaagacgcaagagcagcaagaacggcccgaaaatttgcccggtatgcaagggggaaaatagcgagtacgcccgcagatgcattcacaaagacagtaacggcaatcggtgcgaatacttctggatctcgcagaggtgcgaagaccagaaagacccgcgaacagggaagattaaaatcaaggggtgttacgctgaaaatgatattgttgcccgccaatgcagatgctgcggcgttcagcttaaagaccccaatgacaatctcaccgggaagcactatacgcagaatgactggtatgatgttgtctggttcgatatcggcttgactcgcaatcagtccgggatcatcttcaattacgtgttactgaaccatgacggcgagcgattcaccgcaagggaaaagttcttcccggaatcagagaatcagatttgcggcaagctgtggcggcaaaaggcagtcttccagcacgttagcgacgcggtaatgcgtggcaagttgggcggaatgaaaaacgcccgcaagatcctggagtatgcggaatacttccgcgcgccgaagcgcgtaacgcatcgcatcaacggcaagaaggaggacattatttcccgcaaagactttggaggcgaggagtgattacagacaaaggggattacctcgaatattacggcgggcctgtaaaggcttgcccacttgaaaaaatcgaccagatgaacagcgtttcgtggctgcgttacgaataccccgattatctgttctggcatacggttaacgagggtagcaagcacaaggcgagcgccgttgcagatcatcaaatgggattgcttaaaggcgtaagcgatatccttgtgctgattgggctgggcggaaaatacccgttcgccgccattgagctaaagcgccagggtaaatcccaggcatcgccagtgagcaaggagcaacgggaattcctcgccgccgtccgaagccgtggcgggttcgctgccgtggcctatggattcgagcagtttaagatcgcgtttgaagacgcaatcaaatagcactttttgttaaaactacccggcgcgagtcgggtattattctcccatcgaaacgaagaacggagtatttaaaatgaaaaagattattgctttaattgttctatctcttgttctcattggttgtagcgaaaaaccaaaaacatatatttgcggtaatgaatcgtttgaagttactagcgactatattaaggtggttcgcggtaatagcgctggcgttttaattgatggcattggtgaaaaccagtataagctggttacaccacttggaacggctttttatactgttaataaaaacaccattgatattaaagttagcgtttatcagaacactttaacttgcgaggttaagtaataatggcaaaagatatcacagacaaagacactcacgacgcgttcacgactttcgaacagcttgagcgtgaaacgttcataggcaacgcgcttgccactggcggacactatcaggccgtcaagcctgataaattctaccaggtaacgggcaaccgctacgccgggagcaagacgccggatatcgtccgcgacaagtggtcaaccgatcgcagccttattgcttacatggaggagcgttacgggccatacgacctggacgccgccgccgaagaaagcaacaccgtctgccctaagttttacgacgaaaagaccgattgcctcaagcgctggtgggggaaaaataagcacgtatggcttaatccgccttactcgttcccggatccctttgtgctgaaagccattgagcagatggagcatgacaaccagatcgatattttgcttcccggcgacaactctactgcgtggttccgcgacgcacagaaggcagcggctgagatcatttggattgtcgcagacgtcacggaggacgaagacggaacgcaactaagccgatccggtcgcctagccttcatcaacggcctaagcgggaaaccagtcgacaacaacaacaagggtagcgtgattttcatcatgcgcaaactcaagccgggcgaggagcaaaaaacgttctacgtcccggtaagcgaaatctgcccttcattaactaaaaagcgcatgcgcaaacgtgggatctgaaaaatggaacagcttgaatctttcaccgaatacctccacatcgtcgtcactctgctggacaagtacggcttcatcggtacggatgaagaaaagatggccttcgccgatagcatcgatggcacttatcaagaattcatggataacggcacgccgcttgctgactggcccgcgattcttgagcgcgaattgctggattttcgggcgcgtgaaggtgcggaatatttcgcgaaacagcactaattgttaaacaatgcccgccgcgagcgggtattattgttccatcaaccaatcaggagctaacgccatgaacaccaaaaccattgccgacaccatcaagatcgcacaagttaagccgcgcatcgtatctcgccacctgattaacctttctcgcctgtgcatggccgactacgtggcgaagcctttagagaatggccttgatggtgaaatcggtgcgatctacttccgcgccgcgcacggcatcgaagaaattcacatgtacgagcagatggcggaatgcttctgcatttacggtgacgaatgatgattgtagaatctggccgcgctgccgtatggcagcatgccaaagaggctggcattagtgacgatatcgtgatgatcgcaaagtatttcgatatcaaggatatctccattgtgttcaatgggaaatttacctatcttcatgagcgaccactgaagcgaacgcgtatagcggttgcgacgcgggcagaggccgacgcgctgaagatgttcattcacgaatctaagcagaccaaaaaatattacaagtagcgggagtgttgagaatgcgatatattgcgatcctgattacggcggtggttctcactatcgcaatcttcaactacgcaattcaattgggataaattatgcaacctaaaatcacagacgaagaatttttagccgcccgcgaggagggcaagacctaccgcgagatcgccgaagagttcggcatgaacgttcgcagtgttgagcgtcgcggcgttcgacttgcccgccaggggcatttgcacggtaacaatcacgtagcgaagcacatcccggacgggttcggggtcaaaggcacatcgaccatgattcgcgcgaacggtgatgaagttgtgcgctgggtcaagtcagaagtagaccgcgaccgcatgatcgctttgatggaggcggcgcaagcatcattctgcgaagacctacctcgcgctgaaccgcagcctaaggatgaatctaagttttttattgaggatcagctcgccctgtatccgatcttcgatttgcacatcggcgcgatggcccacaagcacgaatgcggcgagaactacgacaccagcacggcggaaagggttcttaaccgcttctttgactactccgtttcggttgccccgcagtcgaaaaagtcggtcttgctggtcggcggtgacttccttcacagtgacggcctggacgcagtaaccccggcaagtggtcacgttctcgatcaggatagccgttacgcgaaacttgtttatgtggctattcgctccttgcgccgagctgtgtcgctactgctgagtaatcacgaagaagtagaggtgcaggtaatcgaggggaaccacgatcaggctggcatgatctggttgcgtgcagcgctcgcagcgttctatgaaaatgagccgcgcgtattcgttgacgtcagccctgcaattatgcatcgtaccgtgtggggcaaaactatgctgggctacactcacggccacacgatgaagaaggcagaaacgcgcctcgccgcaatggctacagacttccgcaaggaatttggtcaatgcgactacatctacacgcattcgggccattggcatcaccagaccgtaacggagcactcgttagggattgacgaagtacacggccagttaggggccaaagacgcttacgccgctcgcggtggttggcgctcatatcgccaggcggcggttattctgtacagcaaagaatatggcgaagtaggccgctttatctaccgcccgaacatgtaaccacaacggccccgcgaggggccaacaaggaaaaccaatgaatagaaatatctgcattttcgatctcgatggcacgttgtccaatggcaaccaccgcttgcacctgctgccgaaaaaggatctccaccttacagaaagttggagtgaatttaatggtgcatcaattggcgacagcccaatccaaagcacaattgatgtagcgaatgcgcttcatcgctccgggatgattgtcgttatcctgaccgggcgatccgatgaggtgaagaccgaaacaatgatttggcttgaccgttacggggtgaaatatgacaggctcatcatgcgtcgcgccagcgacaaccgtaaagacacggtaatcaaggaggaggagttacgcaaaatcggaattgatcgcattgttgcggcatgggatgattcacccaatgttattgcgcacttgcgcggcctgggtattacgacttaccaggtctgcgactacggagacaatcttcaagatcatttaaaatcgcacggagtagacaaatgaaaaatgtaattattctcaacggagcacccggaatcggaaaagataccatcgcggaaattatctcgcggaagtgggaatacaagaaccttagcttcaaacagcctatgtttgccatcgcgcgtgctgtgcttggatctactgattttgcacgctttaccgccagataccacgaccgcaagcacaaagaagtgaaatgcgattttttgggcgaccgttctccgcgtgaattcatgattcacattagcgaaaacttcgtcaagccgaccctgggcaaaaatcagttcggcaagttgctttgcgattcagcgctaacttcgccgtttaactgcatcgtcagcgacggcggttttgatgaggaggtcgagcacgtcgcagcgcatgaggcgcttaacgtatttgtcgtccgccttcatcgtgacggcatgacctttgagggtgatagccgcaaacacattcgacgacccgatctgatttgtgacacgtatcacgaacttgattttgatatgaccactggcgagcctgaagacgacgcgcaaaaaatccttgatatggtttcagatgttgcattaaaattataaagttaatgcctttattatcaccaccttaacgattgggaaccttgacgggttcccttttttttgttcttaattttgccaaatgaatatatcatcaccttaccatttaactaacagaggttgcatatcatgcgggaattcatcaacgcggcaaccaatagcagcggcggtgttgcccttgcgggatctgcatccgggcaattaatcattgctgccattggtttatttttcatgatcttatttggctcaatcggcacgtggctgaagtggaaagactcaaaagccatccgggaggcgattgattctggcgacattaaagaggcattgaggatcaggagcaaataaaatgggaatgaaaacgcggcttactttcgcggcggcggtggcgatcgcggtcgcgttcctccccgaagtggaggacactaaatacacggtttatacggatatcgctggcgtaccaactgtatgcgaaggaatcacaggcccggacgttatcaaggggaaaacctatacccggtcagagtgcgacgcgcttttaaccaagcatatccaggtagcaaagcgaaccgttgacagcaaaatcaaagtagatgttcctgacaccttcagggcgtcgatgtacagcttcactttcaacgcgggcggtggcgcatactccggcagcactatgctgaagttgacgaaccaggggcggctatatgaggcgtgcgaacagctttaccgctggacgtactatcgcaacccgaagacgggcaagatggaaaaatcgcgcggcctgcataatcgccgggatcaggaattcaatctttgcattaaggatctaaaatgagtagcttaaattttcagcgagcattggcaatcggcttcatcgtgtgggcggtcgcactggtttccggttgtgcttccagtgtcccgatcctttccgatctggtgggcagcaagccggatatgacggcgcaagtaggcgcggagaacgttaaacaggcggttggcgtgacgaacaaaacggacacgtcaagcaagcaggagactacgttcaaagagtcggcggtaggaaaggttgacacgtcgaacaaaaaatccgtaacgacctccagcattcacgccaaccagatcacggcggacaagatcgagatccgaaacgatgaaagcggaagcctgactccgtggctgattggtggtgttggggttgtaatgctggcgataggtgcgttcggtctttggcgggaacgaaaaaacaaaggggcgtaatgcccctttttctatatgtaccgcttgacgtgcaatagcgctactccgtcttcatcgttaagaccatgttcaaccgtgttggttgcagccattccttgatagagcaagatgagcgcggcacgcaagtaattttctggtgtgatctgtttcacacaaacaagcctgtgaacttccgttatcagatcttccacctggtttcccgaaaagctgttcatcactgagttggtcaaggtgcatcatctcccatatgtatcggttatccatcccttcgaacgaccggaaatcaaaacctatttccctgttatccggccccgtacaccacacagagccgttttttccgtcaaggtatccattcgtatagcttcgcgctaaaaactccttagagaccattgaggcgaacatacgttgcgatacgttggcggcttttgccagtcgaggcgcttcgcggtgcgtatagacgaacttcgcaaaatcctgccgggtgaactcccggcgagattcgcagaacttgtaaatgtcaagaataaacatcaattacctcatgaacgacgggttgataaagacttcggaatccatcacgcagataaagcctaattcctccatcttcggcaataagcgttccttaatctttttgctcaccccggcctggcctttgaagatcttcaggttgcggcaggcgttataaatgccctggacggtcataacaccttttgcctgtttgcagcgactggcgataacgtcatacatcgctttaatttccgctccctcaccagcaaagccggaagagtcagccgacgacaaatacgttttgctcaattcatggaacataatgatcgcttcgtcaatggtcgccgtgtcgatcttcttcgagcgcttcccgccgggttgccagttccggatcgtgtgaatcacggacgccagacgcataacctgcttatcaaacttacccatcgcgccgcgaagcattgtatgcgaatacttgccgccgtcgcctaactccggttctaactcctggcgggccttgttcagcctacgcattgccgcgtcagtaacctgcaacttaatgttcgactcgctcataatgtcatgaatcagccggaagtaatccgccttcagtgactggtcgatcggctcataggtcgaattcccgttttcgtcgatgaacacgcgttcacccaaacgggtttgctcacgaaccaaaaggaagcgttcagataccccgatcccgcgagagccggcctgcataatggcgtcgatggtttcatcctgggcaattacgcaaatgcagcccaaagcctcgaatgacatattgttgctaacgtcggcacgagcgatcgatacgtggcctttatcccatgctttgagcaccagttcgctgttcgtcttcttaccgccatcgtttccatacgtgatccctaaaaggctgttaaccgccgtcgcctcatcggaaataacggcaaagtttccctgtcggttgttaatcttcgccagaccttccggggtggtatcagataccgggaaagttaggtcacacaatttttctaacttctcctcaagttcgtcacggtcttcaaaaagtttcaccatatcagattgcgataactccccttttagcgcctgcttgttggcggacagcttcgccatgattttcttacgctctttctttcgagactcgttaatgcgttcgacttcggcgacaataggatcgatggcaagcgagttaatggcagacttaccagcggaaggcggctgcgacgtgataacgtaaagcgttgtcggttgctcgctgccgtggtactcgacccaaaagcggcccatcatcgcggcggatacggttccgagaaagtgcatgtaagcggatgattccgggaactgaacagaacgcgctgcatttagcgccagcttgccgacaacatcataatcattggcgatcgagattgttggatacttatccgcgtttacgtcgatatctttgggctttggccagaatgaaacggagtcacgatacccgttcgcacgaatcgcaacgcgcaggggactgatcccctccctttctgcgatggcgataatatcttgcggtgatacgcggtcatttaaaaacatgcccttgctcctgattggttaatcgttcggctaatcatatgccgtattaaatccgagatccagtgataatctaaacacgcttgaaaaacgcgcttggattatcggggcgcatggccccgaacccgtcacaggtatttagcttcgaaagtcgttccgtccgatacactgaagccaacttcctcgcggtacagcgtccagcggcatccatcacgatcgaagatgtatccggcaaccgcgccgagcgcacgaccgctttctacctggtagcgcttgccgacgctgaaggattttttcatcgggttgctatggtcaaggccgacgcattttagcgttttggtttttagttcgatgaacgtcgcaatcacctggccaccagcgccagcaataaacaactcgccgctaacgcctaccgacaaaataacgcgcttcttcttcagttcgacgctgtcatataccatcattgacacattgccttcatcgtcgacgcgggcgggataaaggttattttcgtgtatattaatagcgcggcttgacgtgcatttaatcttgattgacttcgccatttattttctttctccgatctcgatgtacaggtttaccaaatccagaaagtcagccttgcttttgcaacccaacttaaagccaacgtgcgactcaattttattttgcatcgcagccagtgttgcgccgccattattcatcctgagaacttcgcggcatacttcggcgagcttttgagatatcatttcttcaccacctttatttccatgccttcgcaagcgctcttgatatcattaatcagacgattaagccttaaatcagtcattacatggtgatgacgtatatcaataattccagcaacgactaacagcatgacggcaaagataaaaccaccaggcccggacatacacaaaacagttaacatcatcaagataataaatttcatttccgttttactccgttgcgtttcgatggggtgattctacccgactttcgccgggtagttttagaaattcgtgctattctcgataattcgcctggaacacggcgcgggcaaaacctcgcggagtaatggaacgcagcattttagtcctttctgaccttccacccaaaaacttccaggcccaaaagaaattcacgccttctactccatccggcggcgtgagccgtttcggttcgacaaaaccgtttccgtgccatatgcacgttttcttcgtgtaattgtcacagtggggcattttgggatgccacacaggctcgttcggagaaacatagccaccgaagtcgcgcggatggaaataaaaatccggctttcgccatagtgacgataatttcccgaccgggttttcgaccatccaggggcaaccatacttattgcctaattgctcgaccatcttcgcatcccctgctgcggataatacgtcattatcttcccttacgtgcttgattccgctatgcgctaacagcgtgcatggcgggaaagcgaaaatgaagtcaggatctggaatgccgagaatcgatcgcttaacgtcaaaatccttgtcaatccaaatgttaacatactggatatttgggtgaaccattcgaatgctatattctccgtggtcgccggagtcggcgttgaaacagtacaccttgcatcccttgatggcccacggcaggcccatgatgccggagccgtcgaacatgcagtaaataaccttttctttcatgctttccacgcctcaatgaacattctgttcgattccagcgtcagcgtgacgccagccagggaggactgaatgagacgaccgcccggaaccgtcccgatgatgtagcggcctttcgacttcgtgatcgtgatctgagtgaagccggaggcgcggttcatgcggagaacgacgcggccatgagcgttcaggacggcgagaatggaatcagtcttcggatggttcattgtgtagctccttcgtttgttggtatggggacagtatgccactatcccgctgtgttgttttagcaaaacgtgctattccggaacgcaggtcgcgtaatcctggctgatgtagatcgtgcgctgaacgcgaggttcgagatcaccgagttcctggatggtaacatcgttgcttcctacccggcacggaaccgatccgaaaataaactcgccagtctgcttgtcgttgatttgccatacattaccgccttcctttttgacaaccaggaaaggcgcactgtctgcactgaactcttccgggccacgaccgtagtaatgcgtgatcgcagctttggccgcagcgctgaaggcatcggtaacgtcattggtcgccttgtctcggatggccttgatacgttcttcaggcgatccgatgatgtaggaaaagctgttcgaaatggtaactgttcgcattatattttaacctcgttttggtggatgaagtcggcgacgtaatggcattcgatcgggttctcgatacccgccagcacctcgcaagacccgttattcagtagctggcaatgctggcactccgcaccgccaacactggcaatgacaatggcgatcccgttgcatgaaccgccgaacattcgatgagggaagtggtaagcatcgcaggtgcaaaccacctccccggcccgccgtttcctcatacctggcccttctcgatgcagaaaacccaatcacgagcgtcaaccgcaaagcgtgcaacgccgtcgagcaccacgaagacagtaaacccgttgacgccgcgacccttctcgatatcggtcacggtgcggaacagatcgcttgcgccatattgaattttatccccgacgactacatccgcaaatgctttcatggttaatctcctgactggtttcgatgggttaactataccaggcctcgcggcccggcgtttagcaattcgtgcttatttcactgctttcttcgctgccttgtacgcctctttgaaagccggaacatcttcgaccggaatccagaagccggagccatagccatcgtcatagcaagggcattggtcgcagtagtcgccccaggttttctcttctccgccgacagagaatccagtgggcattttgcataacgcttcctcaaccgcttcgatcttgtcggcgtcgctatccatgataacgaagttccacttgccgttatactcgctgcccaggttgattgattcgcgttgaagtttcatagctttagcccctttggctcaattcgtttcgttgaagtcatcatagcaaagccgatcggatggattttaacaaaaaatgctattcctgcgattgctgattattccaccgattcggaatagtggaatagatggtgattgcacctgattccctggtgattagttttgacgaatcatgattgcttttgattgtttcattttgtgcaacgattttgtgagtgtttcaggatttgcaacgaattgcataaatgtatgcaccatgcacgcaatttgccgatcgaagccagcaaaagcgccaggtgtttttcgccaacatttacgtcgtgtggaaatgtgggggaggaataatcttacctaaaaattgcgcaaaaagtgaccaacataagcctataatagatatataagtatatgataaataataatattattattattactctttatctatatatatgtttggtaagatttcttcggggaggttatggattcctcttgcgcaagccatagtttttagatgttccgccgcgaaaaaatgtatatagggatatataggggatgacagcaaatcttaccaaacacgcttaaacccttttacggcaaggcttgcgggtggtaagatgacattcccacacaagcaaaaacgacgtaaatgttggagaaaaacacatgcaatataaaggctatgagttcgaagaagtcgacgtgtccgagtggatgcagtacgacgcagataagcaggcagcttaccatgaatggctgcaatccatcacgtttggcggctcaccaggggtagacgatcggccagttgctgaaaagtcacccgccgcattcactggtaatcgttcgtccgagatccggcgcatgttcctggatggcgggcgacgtatccagatgacggcggaggagttcgcggataagttcggcgttcatccggtcgacaaccatttccgcaggccgttgctgaaactcctggagccgggagaagtgttgcgggtgagcctgggggcggggttgatctccgtctttaccgagttcgacgcaatgactggctcaaacatggaggctgaggcatacaggcggcagggcgctatctccgagagggaaaggattaagggtttagtggccgctcttgctgtagactttgccggacatgccctggccgggatttacaaggcgaacttgttcgcggctatcgatcttggattgaccgccagcgatatcagccaggaagcggccaccacgcaatagcactttttgttaaaacccggtcagagcgatcgggtattgtctttccatcgacaacgaaccgaggaaaacgaaatggtcactcttatcacatgggaacacgaaaacagcgagccagtggtgcgcgaattcgagaccgtagcggcatgttacaacctggcggcaaatggtggcttttacaaggcgcagatcgttaacgagttcggggttgttgattatgaattttaaggcgagcgacgtaaaacctggcgtggtctacggatcgcgcctcaataaccgcctttggcggtgggacggcgaaactatgtggactaaaggcgagggcgatgttatctggcatgaatgcggctggccataccccaccatgagccgcctcgatatcgcttattatctttcggttggcgatatgcacgagatggaagatagcactttttgctaaaacactgctgtcgagatccggtattatttattcatcgacaacaaagaggagatgaaaatgagcaagaagaatccatattcaaccagcaactaccataacgaacacgtcatgcgctggcactggcagaaactcaaagaacgccaccttgcacgccatggcaaataatcacaatagcgccgcttcggtggcgctgtatcccaaccataaaaacggcttacaccaggaggattggccatgccacgattttcagcaacaacaaaacttcgcaccttcgccgggatgccgatcccatactcatcaaccaaagccgtccagggcagcgagcacggcgtatacttccactggtgcggcaagtggcgcttcaccgtcattcgcggcttttacgtgacctgcgaccacgtggatattaccgactattccggcggaaaccaggttcatgagttcaataggcacgaatagcactttttgctaaaactcgatcggggcaatgcgttattattaccccatcgaaacagaggagcaaaaaacatgattggcaaccacaacaacgaactgaacgcagcagcccaccgtcgcgccgtcgagcagaacttcaacgcgcttaaagtagcctgcgatgagatgaaagcaatgcttgaactgccgtcatgggatccccaactcgaagactattacgacggcctccgcgtcaagcgtgacgatatcatcaaccgcctgcgcctggctggaatgtttctgtaaggagaacgcaatgattcacgaaattaagtctggaaaacaagtagtggccaccatcacgcagcgccacgttgtagcatttcagtttaacatccccggcaccaacgatatgcagtctcttgacgtgccagtttgggctaacacgatcgccattgatgccgacggctcgatttgggcctacgagtcgaccgccgaggatgtttgcatcccggactactcgcgcaaagcctgggtggattgtgggccttccgaaaacaagatgcggtcagtaggggagatggatcgcttccatgattgggcagaatcgaagattgaccttcgcggcctgaaatagcacgcattgctaaacgcccggtcaagggatcgggcataatcatcacgaagtctattaacaaaccgattatgcaaggagacagaagaatgcaacaatttgaatctcgcggcaagacatacaacctgccggacactgctacccatgccgcccctggtgcgtgcggcggcctgtattttaaggatggcgatagttggtttttcatgggggatgtggttgggggtgtaccgacgaagacaggcagcttactcgtgggcttctacgatcacgacttggtggagttgaagccaaagcgcgtaccgttcgctttctggaaaaaaatcaaaggggcgatctttaaatgaatcaattcgaattcctggcgcgtgcgcaccgtgcgcttgcaatgtacgccttcagcaagaacatgaagattatcagtgttgaggttgagttcaacaatatcagcatttccggctacgttggcgactcataccacgtgacgaaattcagcttcccatcgctggcttgcctggagcgtgaggcattcggtttctgaatagcactttttgctaaatgcccggtcagcagatcgggcataatggccacacaccaaacaacggagattcaccatgattcgcactaccagaccactacccaataacctttacgccacgattggggttcgcgcggtgagacttattcacatcaacgaagttggcaacgtggctattttgtggtttaagcgccactcaagcggtgttggcctgagcattcaaagattcgggcgctttaacggcaactcccaaacccattctcattgggttgatggctcatactgctggacgcacgttaagcacgtcgagaacttcgacgccaaatcactgagcgacgacgacgcctggaagatggtaacagacctcttcggttatgatgcctgcatggaggtagttggatgatacgtttatcagacttcgatcgccactgcttaaccgggcaatttggcgaaaagccagtaatgtgcaagatctcgaaggtaaaaggcgaccccgtcgagcaggtcaatacgcttaaaggcctggcaatgcgcaaccgactttacatccatgtgcgcggcagactgttcgcacagcaggttcatttttcgcatgggacgtggttctacactggcggggacggggttggcccatcgcagaaaagggttatgctgcgcgagataatcgaacacggttacgtttggactaacgggatctactaatggaaacggtaaaagtaatttgcacgcacgctggctattcgccgctatccacctatttcacgcctggccgcgagtatgacgccatgttcggccccggccttgatgaagtgtggattttgcaggacgaccagaacaccacggaagacgaagaattttggccagcctgccgcatgccggacgaaaagatcgccatgtacgccaataggccatacgaaaacaacgttttgtttgaggtgaaagtatgaaagtaagcaaaaagaaactcgcgctgtattgggccttcttcctggctggccttgccctgcataacagcgtgggctggcagacgatcggaatgctgtgcatgattattggtgtatgccgactgtctgagattaacgggttccgccgtggatatcgggcagcattcagcggcgaaaaagaatagcactttttgttaaaactgccgtaacgtcatttgataaagtggcgttactgaagtgaaacaatccaatcaggagcaacgcaatgaacgataatttaatcgcactgctggaagaactgaattcctacggctgtgcatacatcgagctttctagcgaacacgttatcgaagtcattattgacgatgacgcagggttcaccaagttaagggtggctaccggggccgaagaggaattcgaagactgcggcatccgtgaagtaaccaaccttctcgaagttcaccaggtgaaggagatccgctaatgaaaaccgtcaaactaatggttgtcaatgcggcccgcgaacgtgaacgccaccttatcggctgcgtattcgatgccgtcgaggtaaaagactcaaaaggagactttcacgtaatacagggcggataccttaacgaatttatcgtcaatccgctggatactgacgaagatttgaccatccgtgttggtagcgagccggaaaacgcgcttttccacctgcgtaaagtatcgaaggcatcgcagcgcaagttgctggttcgcgcactgaagcgcatagcgaagcagcgcggctacaccgatgcatacatccgcaagttcggcacgttcgctggagtaggtgattgggcgcggtcatgggccgacttttatttcaacaaatccggcgaattttgttcagcgcatacggactggctgcatggcacggaacacgatccagttaacggccacgagtggtacgaattcattgaggcggaattagacgccctttgatagcacgaattgctaaaacgaacgtccggggatggtgcatactatccccacactaacgaacaaaggaaattacccatgaacaaaccaaaaatcatcctgatcccgtccgtcgattccgtggttaatacttatgctaaattcaccaaaggcaagcgctataccgcaaccgcatttaccaaatgttccggcgaaatgctgtacaaggtcagcgatgactacgggcgcgagtatcacgtaaacccaagatcttcgcactatcttggtggccatcgcttcgatattgagtacccgatcgaagattgcagtaagcgcgactcgttcacctacgatgacagccgttctatcgccattcgcgctgcaaccatcggggacgggtttattagccgggcctgcatcgttgatctgatcccgtccgataatcacgccaaagacgacgccgacacgctgttaaatgccgtcgttcgcgccggaatcggcttggagttaagtgatgcgtcgtgcgaatcattcatgcgtgaaccgttctcacgaatcgcggagcttgaaaagcaagttgcgttcctgactggtgaacttcaggccgcaaacagcaagatcgagaatgttcgcaaaatcatgcgtagcaagcctggccatgacattgaagattacgcgcgggttttgcgcatgatggccgacgcattcgccaaactttagcagtagcacgaattgctaaaacagatcaggggtaagctggtatagttaccccatcgaaacgaaacggagttacagcaatgaaaatcaaaatcaccaaaatcaacactcttaacggcgacggctcaattaccctggaagaatgcggcctcaaaatcggcgaagttcttgaggtcgacggccacttcaacgacggctcatactgtgtgatcgctccgcgcaatagcgagtttatccaggctggtgacaatatcagcgtaagcgcagacgaatgcgaggttgtggaagaatgagcaacaaatttgggtactgacttacaccattggaaccaacgaggggcgcaaatcgcgccgcctcatctgcgacaccaaagagcgggcgattaggcagcaaaccgttcttggtggcgaacttgtcgagtatctccgcaagcctgaagcgttcaaggtgaactggccggaaggcatggatatcaacggcgctttagcgagcctgcgtgaattgcagaacaacccgaagacgtggagcgactttcaatgcctgcgggcggagccggaagtgaaggccgaccagttcaccaatgttcggtcgcagcacgcggagtggtcggatcgccagttcggcgacgttgggccagtcgggccgctcaaacacctggcgaaagaggcgatcgaggccgccgaagcgccggatgacattagcgagttcgctgatatcctcatgctggtatgggacgcaacgcgccgcgccggattcagcgatgagcagttggctgaagcggtggcggaaaagctggaacggaacaagcgccgggcgtggggcgaggtcaaagatggcgagccttgccaccacgtaaaaaattaacgaaatcgaatgccgtttaaagcgcctgtaagccattctggctggcgcaaatttaaggagtacgattgtatgcctgaatactcgaaagtcgaagatatgccgattggtgcaacaattactggtatccgcatgagcgagtcggacgacgccatcaagccgctggcgttcccggttacgcaggtggagacggacagcagaaaagggttcatcttcatctacaaaaatttcaatagtccgctgcgggttgaagtattcatcgctcgcggaacctgggtagaatgggagaaggccaaatgttcggactgaatgaagcgcagtacaacgccgtaaagcgcatagcaaagcagatggccgcagaaacaaaagacgccatcaagaaggacaagaagacctacgatcaggtcgccgcgaagatgatcgataaacattgggcgcaaatcaacacgctggttactcgcggccagtttatatggatagctggctacctggaaggccgattcggtcgaagggatggcgagtatgaataaaaaacagccaaacgattcagtgacctattgacgcaatcgcgctgatcgggtaacgtgaaccatgtagacacaagaggcggtaaacatccgcaagcctggccccggttaggggcgtttacataggagttatgatgcaatataaaatcatgctcacagcaagaaaaatgggtggcttttgcaaatcctgcattcaagagttcagcatgactattgaggcgaacgacaccgccgacgcggtagagaaagcaaaaaagcaatccggcgtaaatctggatacgcataaaatcaacatcaactacataagggaaatcagatgatgctaactgtgattattgctcttttaatgctttttataggttatcacgtcggagcggctcaccttgtagagcgactttcaaagcgggtacatgaaggcacctttgctgccatgatgtacaataagaaaacggcacgttgggaaaaaattggcgatccggatggtatcgcaaaacgaattgctttttcgccgcttccgtatgttgactgtgagctatttgtgaaactacagaagacgctgaatcggcgaaacaaactgatatgacaaaagaacccgcttcggcgggtttttttatgcccgcgatctgatatactcgcaaatcaacacagaaggaggattacaa

SEQ ID NO: 246 - DNA, 49451 bp, synthetic construct
  source 1..49451: mol_type = other DNA
atgtctgaagaacgtagaaaacgcgtaacgaaatcgcactttgcaggcaactttaaagcgctatatgaaaaggagttcggcgtggtgctagggcgcacggcagagatgacgccggaacaattttttgatatcgcaaagcgttacttccagtgggccgaagataacgcaatcaaggctgcggagacggcaacgtttcagggcgacgttaacgagtggggagtgaacaagcctcgaatttttacgctaacagggttaagcctgttttgcggcgtgaaccagtcaacgcttacacgctatcgccacgatcctaactatgctcccgtcatggagttcatcgactccgtgatctatgagcagaaatttcagcttgctgccgtcggcatgattaacgcttctttcgtcggaaaagagatggggatcgataagccaccagtgctgaacatcgacgctatcgccggggataagaacgagatcaccgaagagaggttagagaaggcagtgaccaatattcttgataagctgtaagggtcagatatgaacgaaatgatcatttgggaagacctgtcgccagccgataagctggcaattaaggcgcttagtacgcgcaacttttcgctattcatgaagatctggtttcagatcatccagggagaaaagctgatgtggaactggcatcactcctacttttgccacacggttgatgaaattatcgccgggaagcgcaagagcacgatcgttaacgttgcgccaggctccacaaagacggaggcgttctcaatccacctcgcgccgtatgcgtatcttaaatgccggaaggttcgaaaccttcagatctcgcagggtgacgcgctgtcaaaaggcaactccgatcgcgtgattaagatcttctcatctaacgagtggcaggagctatggccatcaaagttcgggcgcaagcagatcgatgaatttcaggtcatggacgataacgaccgcgtaaggctggaaatggtctcccgttcgtccggcggtcagatcgtcggtaagcgtggcgggtacatgacgccaggtttcagcggccttatcgcgctggatgatatcgacaaaccggatgatatgttctcgaaggtgaagcgtgagaaaaaccacgtactcctgaagaacaccattcgatcccgtcgagcgaagaagaagaaaggagacgaaacgccgatcctttccgtgcagcagcgattgcacgcgcaggattccacctggttcatgatgagcggcggcatggccatcgacttcgatcggattgttatcccggcgatggtaacgcgggaatatggcgaatcactccctgactggttgcgacctgagttcgagcgcgacgtgctttccggcccgtcggtggtaattgacggcgtggaatactggtcattttgggaggaaaacgaatcgatcgagaacctggttgcgctacgcgaagccgatctttatacgttcctttcgcagtatcagcaggaaccgatcgccctgggtggcaacgtgttcaagtcggagtggtggcgctattacggcgattccgacaaggcgcacgagccgcgcccggacaagttcgaatatacgttcatcacggcggacaccgcgcagaaggtcaaggagctaaacgactactctgtaatgtgctattggggcaagtatcgggatcgcgtctacttcattgacggaattcgcggaaaatgggaagcgccagatctccgcgttcaggccgaagcattcatcaagcagtgctggcgtcggaacaaggagtgcggaaaccttcgccggatctacatcgaagacaaggcgagcggtacaggtctaatccaggatttaacgaaggcggtaaacggcatgggcgagatcgtcccggtgcagcgcgataaagataaggtcactcgcgctatggatgcacaaccaatcatcaagggtgggcgtgtcgtgctgccggacaatcacccattcgttgcagagcttgaggcggagatgagcgcgtttacatatgacgattctcatccacacgatgatatttgcgacaacgtgtttgacgccgcaaacctggaaatgaacctgagcgacgatccggtagagcgaatgaaacgccttgcgggattgaaaaagctgggtcgctaatacataatgtgggcctgacggcccacacttaaacaaggttgaaatatgaataacattaagatggacgactataatcaaatctttaatggtggcgctggttatgcgtcaaccctcgcgtctatcgcggcaagatttggaacaatgtcgcaggttgaagagttctatcatgaaaacggcatggcgaagaaaatcgttgacgtgatcccggaagagatggtcgctcccggcttccagctaaacggcatttcagataacaccaagtttcaatctgaatgggacgggttaaatctggagccgcaaatcaccgatgctctttgctgggctaggctgtatggtggctcctacgtcctggcgatggttaacgatggtcgcgcattgacttcggcagcgaagcggggtaagccactcgaatctatcgttgtttacgaccatgattccgtttccgtcgcagaggaggaaaccagtccgcgaagcccacgattcggaaagcctaaaatgtacgaggtgaagccgctaaacggcgggcaaccgttcaaggtgcattatacccgtatgcactacatcgacggcgagcgcgtaaccaacaaggtgcgcaagctaaataatggcgctggtggctcggtgctgaacaagtcgattattgaagcgattcttgattacgactattcggaatatctggcgacgcaactactgaagcgcaagcagcagggcgtttggaaggcgaaaggcctggcgctaatctgcgacgacaaagaaggcgagtacgccgcccggttgcgcatggcgcaggttgatgctaattccggcgtcggaaacacgatcggtattgatgcggacgacgaagagtacaccgttatcaactccgatatttcaggcatcccggaattcctttccgcgaaaatggatcggattgtcgccctgtcaggcattcacgagatcgtgctaaaaaacaaaaacactggtggcgtaagtgcaagccagaacacggcgctacagacgttctacaaactggttgaccgcaagcgcaatgacgattacaagccgctgttagaattcctgttacagttcatcgtaacggaggatgaatacagcgtcgagttcgaaccgttgtcgctgcctaccgatgcggagaaagcggatatcttccagaagaacgccaacgcggctcgcagcctcgttaccgaccaggttattgacgccaacgaagcgcgtgatactctgtcggcgttgattcctgaactgaagctaaaaggcaacgctccgaagcagaaaaaacttccggatcgcgccgctggttcaggcagcacgcaaagcgcagagatcttaaacaacacggaggcggatgatgaaagttaacggcagaatcccaaactggcgttatcctgaagcaagcgagcgggagttatcccgctcaatgcaggacgcggtgacagaactcgtggtagaaatgcgggatcgcttagaccgccttaaatttgacgccacggctgaggaaatcagccaggcggaagacgatatcagcgaatctgccatcgtgttcttttccgccgtaattgcggcgctttcctccattgggttgactatctatagattcaattctaaacagtggcttgcaattgcgatcgcggctggcgggcggaacaacgaatcagttatgcgccttaaagaattcggtgctggtgggtatgaagactggtatcaggaatcgctaaataagtggcaggattacgccgaagcgtcaatcaggaagttagcaagcgatatagttgctgactggacaacgaaagttagaaccgccaacaacattggcaagtctcgcaagcagatcgatgaaatcatcgaaggtcgatacgctatctatggtagttggtcgcgcaaccgggcaagcggaatcatcggaacttttaacagtatgttgatgatgcagcgcctaaaagatgctaaagtatcgcattacttttggttcgggatgatggacgaccgcgagcgcgagagccatatcaagctagaaggtaagcgacgccccgttaatggtgacggaatcttccccggcgaagaatacggttgcaggtgctgggcggttccgtcatttgataatgaggatgattgatggttaactttaatgattactttaatcacgtaggaaaggatctgatatggaagcgagcaacatcaaaccgcgtaaaagttggtgatgttgccgggtggaaagatgagcatgggtatgtatacattagattcatgggcaaactgcgacaagctcaccggatcatttgggaaatgcaccacggcccaataccagaaggaatggaaatcgatcatattaaccatgtaacggacgataacaggatcgagaatttaaggcttgtaaccagaaaggaaaactgtaaaaacgtatcaatgagcgtaacaaataagagtggagttgtaggcgtgagttggtgcaagagaacaggtaaatggtttgcatccataagggttgataaaaaagagcgattcttaggtagatacgaagacaaaaacgaagccatttcagcaagaaaggcggcagaggcaaaatacaatttccataaaaatcacggagataaaaaatgaaaagagttcaaaggttcgacacggtaaagatgaaggccagattcgatgagaacggctttctggttgatactccgatcgtggcgcgtatcggtgcgcagacgtaccagacgccaaccgggcagcgcgtcgagttccgcccgcgttcggaggtgttcgatgctgaatcgctggcttcataccagggcaagccgatcactttgggtcacaagatggtgaacgcgcagaacgcaaaaggccttgtcgttggctcgtgctccggcgctggcaaagaagatgggattggtgttcttgttccggtgatgatttacgacggcgagtcaatcgagcaagccaaaaagcgcgtagctgctgagttatcagtgggctacacttcggtcgatatcgatcgcaaaggttggggtaataacgcaactggcgaatattatttcgatgaagaccttccggaaaacttcgaagagatgaaaaatgattccgtctctgattgggttcgctttgatgcagtgcagacgaagattcgcgtgaaccacgtagcgctcgttttccgtgggcgtgccgggattgcgaaattaaatcttgatagcgaacaagaattcccctatgatgacgactcaaaccacaaaggagctaaaacaatgatcattaaaattgacggcgtagatgttgaagtagcagataacgttggcgcttacattgcaaaactcgacgcgcaagttgcatcggcaaccagtcaggtaacgagcatcaccgcagagcgtgacgcacttcagaccaaagttgatggcattgaagatgaagtcgccgcccgcgttgctaaaatcaaagccgacgaagacgcaaagcagaaagttatcgcggttgtttctgccgctggcgtcaagtgtgacggcctggatgttaaggcaatgaaagttgcttacatcaaagaggttgacggtcgtgatctgtctgataaagaagattcgtacatcgacgcttcttttgactttatcgccaactctgataagatggctggcaatcgctccaaagtcttcggcaaaaaagaagatggcgagcaaaaagacaaaggcggcttaccgaaacttgacggcaccgaaatcatcgatccgcaggcaaaattccgccgctaataatttgcggccttcgggccgctaccagaccaaataaacaggagattcaaaatggcacagattccagcttcttattcccgcaagcgtgatattgccgtagcggggcagatcgctgatacgtcgctttataatatcgacggcacttgcgttgctgaaggcgatatcaaggctggcgtactggtggcttccactggcgtagtttccaatggccataaggtcgttaagccagcgaaagcagcgagcgacgtcattgtaggcatcgcgcagttctcgcaagcctactcgcctgaaggcaagtatgacgatgagagcgcggttaacgttatgactcatggccgcatttgggcgatcgcggacgcaactgttactgaagcagattgcgtgtttgattctttcgccacctttaccgcaaacggcaccgtagcgaagggtgatgccggggttatcaaaactggctacaaacacactggcgaatacaccaagaacgcagatggcaccgttctggtgaaagtgcaggtgcttcagggcgccgttgctccagcggctgcaactggcggcgctggcgtataaaataaggggcttcggccccatttttgcaccagaaaaaaacctttgacggcttaacgattcgtgatattcttcatctcgttaagccaaatacacaaacaggagtttttcagatgactatgaaattagatgcattcgaacagagtgcaattaaggtcgcaatgcagggcatgggcgtcgatgccgcaaaactggatgcttacggtatctggactgttaagcagatgactcaattactgaatcgccagtatgagcaggcatacccgcagaccagcgcacttgagcttttcccggtaactaccgagatctcgccgaccgcccgccgctttgagtggctcgaattcgatggcgtaacttctgcgaaaattatcgccgattacaccgacgacctgccgaccgttgaagcgatggcgaaagagaagtcagggaaagttttccgcctgggtaacgcgtggtttatttccatcgacgaaattaaaactggcgcggcgctgggttccagcctgagcgatcgcaaggcaactctggcccgcgaaggtcatgagacgctcgttaatgatctggtgttcaaaggatccgctcctcacggcatcgttagcgttttcgaccatccgaacattaaccgcatgaccgccagcgcggcttggggcgatgacgcagcagcggctgaaaaggcattcgaagatctggaagacctgctaaacatgatcgaagaaactacgctgggccgccatcacgcgaccaacatcgtgattcctccgtctaagcgtcgtcttctgacgaaaaagatgcctgacactagcggcgactcttatctgacctggttcaccaagaaccacccgaacatcaccattacggcgatggcggagctggaagatattgacggcgcaggcaccaaaggcgtgctggcatacgaaaaagacccaatgaacatgagcatcgagatccctgagcggttcaacatgctgccgatgcagccgaaagacctgcatttcaaagttccgtgcacctccaaatgcactggtctcatcgtgtaccgcccgctgactattgcgattctcaccgggatttaatcaaaagcgccttcgggcgcttttttattgcattgcattctgcaatgtgctttaatttgaaacctaaagtaaaccaatggagcattaacaatggccagtaaaaaagaaaccgtagaaaccgtagaaaccgtcgaaaccgtagaaaccaccagtgccgaacaggcgtcgcaggttgttcaactacaaaacgttggtgcatgtgcaattcgctataaaggcaaaaattacgtctatgagcaggtttttgaagtgccggaaaacgaaatcgaccgattccgccacgaaatcttcaaaggccgggtcgaattctacgacaatccgaaacgcacgcgcgaatacatcgcagcggtgaaggcgaaagcgaaagagatcgtgcagcctaaaagcgcggaataacaaaaactaacaaagggcgcttcggcgtcctttttcatatcaggagagcgaccatgaattacacaattcaagatgtgatcgataaaatgcgcagccttgcacctccgcttaaagaagttccagatgaactgctgtctgcgtgggttgtgcttgccgaagagttcgtttgcaaatccaggttcggggattccatcgttacggcgatcgcattgatgaccatgcacctaatgtttttggatggagcgatgaagcaggaaggcgaaagcctggaatcttacacgcagcgagtggcatcgttcaccctgaccggggagttttcccaaaccttcgatcgcgtatcggcgtcaagcgacaacgaaatgctttctacgccgtggggcaaaatgtactggcgtatgctcaaaatgcgaggcggtggcttcggcctccttaccgccgggaacgtgcgccgctgcggaattggtaggtgatcgctatgaactacaaacaaatccaggcacgcgcaagcgcgggcattaagtttttcagtgacgctgacggcgtattcaacaagtacacgaaaggcgctggcggcggaatcgatccggaaaccggggaagatatcattcctggcgaggtggtaacgacaatcaagggcgcgatcagggatgtaaattaccgtgacattaacggcgaaaccatcctcgctggcgataagcgcgggtttttcactcatgatgtgccaatcatggagggtgacgaaatcgaagtagacggcgagcgctaccgcgtggttaatgcccgtccggtaaaaccaacgggaaccgttgttgcttaccgtccagttttgcgcagggtggcgacttatggctaattacacgatccgggagttcacaggggcaattgatgcatggtgtaaggccgctggtgatgcgctggaggacgttgtaaggtttacgtgtgaagatattcaccgcgacctcgtaatgcgttctccggtggatacagggcgcttccgtggtaactggcaaatcacctttaaccgcgccccgctttacgcgattaacgcatatgaccaaactggcgaaaagacaatccagaacggcaaagccaacattgcactatacgcaaaaggggctgggatcacttcgatctggttcagtaacatgctaatctatgcgaacgcgctggaatacggccattcaaagcaggctcccaatggtgttatgggagttgttgcgatccggttgggcgtttatgttactgaggcaatcaagcgagcgagggcgaaaaatgcattatgagatggcgttaaaatgcaaggcggcagtggctaaatttgccgccgagaacgggttaatggtcgcaggagataacgttgactttaagccaccaaaacacggtgaaacttatctcaagttctcctacgtagaagcggattccagatctgtcagcctttccagaacttgccgcgtttatctggctatggtgcagattgacgttgttttcaaacccgggatcggaaccgacgccgcgcggctaatcgcgcaaaacgttgcaaaatccttccccgaaggcaaggttgttgattctgaaagtaagttatatgtgagcgagtgggcggaagtgtaccgcgttcagaaacacgaaacaggctggctcctacccgttcgcttcacagtaagatgcgaaagcgcggaggagagcggttatccatcaacatgactggtcttagaggtgcttataatttcttgccagcctgtaaatatataggcataatggcgttgttaaactttcatcaaaacaggagtattcaacatgcatttaccaaacggtgcaaaggtcttctttgagaaggctcgcggtgcggccattccgtttaccgcaatgaccaacgacgcgaaaaacccaaaaatcacagtggcggacggcaagctgaaggtgaaagatattgtgatcttcaccgattgcacctggggcgacttcgttaacaaggtggctcgcgtaaaagcagtgacagcaggtgtggcaacgctggaagagttcgatacctccgacactaacaagtatccgggcggcgcggccactggtaacgtgagcgtgatcactgattgggtcgaattgccttgcattcaggatttaggcaaagacggcaacgaacagcagttctataactatcagtgccttggcgatgagcgcgagcaatcagaacctacttacaagtcggcggtgacgcttaactacacgtttgcgcacgattacagtaacgcgatctaccctgtgttgcgttcagccgacgccagcaagcaggcgagagcgatgtacatgtatatcccgcgagcttccgaggttcgttactggtctggaattgcatctttcgatgacattccttccacggctgttaacgagatggaaacggtaacgcttaacattgcgcttaaaggtgctcacgtcttccttccggttgtcgtgtaattaaatggcggggcttgtgcctcgcctttttttgtgcataatagcgaataacacaaaccaatcaggagttaacaaaatggctaaattcaaaattcaaattggcggcaacctcccttctttcaaactgcccgtaaccttcacttgcccggatggcaaagaagcgaccatcaccatgaccgtaaaacatcgctccaccgatgagatgaaagacttttatgagagcgaagataaagcgccaaagggtaacgccgagtttatccgctttatggccgaaggctgggatcttgatgatgagttcaacgacgaaaacatttcctggctttgcgctcacttcccggcgttcgtcatggcactgccacaaacttacatggccgcgcttgcgggccaccgtgcaaaagtttaaggcgggctgtttatctcacgcttcagcctgagctaaccgatcgccagcttgccgagtacgggttaaggcgatcggattatgaggcagatcttgaaacgatctactttgatgaacagaccgcccaaagctggcagctattccaggccatgcaaacgcagtggcgcattgggatgaacggcccaacggggcttgactataatacattgcctatgttcttcgaattgtataaaatcgacaatcgagaagcggcattacttgacttgcaaatccttgagggtgaatatctgaaggagatttacaagaaatcaaaataagcgcctacgggcgcttttttcatatgggggctaaacatggctgataaagtagctgggttgacgtttggcgttgacgtttcgcaggttgataaagcggtacgatcactagcagaactgaaaaaccaaagccagcaaacaggcgctggcctacagtcacttgcggacgctgaaaggcgggccacggcgcagaccgaggaaatgaaccgcgcgttgcagcgccagaagcaagagactgacaaatcaaaaaccagctttagcaggatcgcaagcgccatcgatccaacgatcgcaaaaatggccaacttgcgcaaagcgacggaagaacttgataaagcgtgggcgctgggtcttgttccggacaaggaatttttccgccttggcgctatcatcgagtctaccaccaaccaactccggcggcagcaggcggcgctaaccgaagaaggtcgcgcagcaatcgcagaggcggaggcaaagcagaaggcggcaaacgccgggcgtgattttgtcgccagtctgaaacagcaggctgactccatcgggaaaacacgcgccgaactgctggaaatgaaggcggcgcaattgggtgtatctgcggaagcggccccgttcattaatgccctgaagcagcaagagcaggcgttaaagaaacagcagaatgcgatgggcctggctggcatttctgccgggcaatataaaatggccatgcgccagttaccgatgcagatcacggatattgtaacttcccttgcgtcaggtatgccaatctggctggttgcggtgcagcagggcgggcaaatcaaggacagcttcggcggcttgagcaatacgtttaaggtattgttgagctacattaacccgctaacggttggtgctgcgtcgttgggtatcgccctggcggcaatcgctaaagctggttatgactcctggaaagcgcaacgagaactggcgaatgcgctggtgctgactggtggctatgctgcgaccaccaccgggcagatcacagccttaaccgaagagattaacaaaaactcatcggctacgattggcagcattcaggaaatcgcaacatcgctcgccagttctggtaagtacacaatcaaccagattaagcagatcacgaagactacggcggaatggtcggcgcagacgggtgagagcgagaagacgatcacagggtattttgattcgatcgcaaaagaccctgttaaggggcttgccgatctcaatgagcagtttaatttcctgaaagagggccagctaacctacatcgaatctttgcgtaaaaccaaaggcgagacggcagcagcagaggcggctacaaaactgtttgctgatactatggataagcgccttaaagatatcgcggacagcgcaacgccactcgaaacgatgtggacggatatcaaaaaatgggccgctgactcatggaaatgggtaggcgatcacacggtaggggcgctaaaccttatcgttgatacggtttccgcgatcattaacacgatcaggaagctgattgccgacggcgacgccatgatcgcgcagttcatcgttgacgctggccggaagctgcaaaaaattccaggaatgggcgactttggcaatgaatttctggcgcagcaggagcagctaatcaaggactcgaaagcgaaatccgacacgcttgcaaaaaccattgcggaacagcaggcaaggatcgcaaaaggcgaaatgggttacattgatgccgcgaaggataaaaccctttccggtgggtacagcagcaaaacgaaggatcgcgtaaatcaggaagaaaaagatatcctgaaaaaccgcaacgccaggaagcagcaggtagacgcgggcgttaaaattgatgagcagtatcaggctgaactgctatcgctacaggcgcagctaaaggttttgcagcagcacaaagggcttgacgacaagatcagccagcagcgcaaagactacttcgagacggttgctaaattccaggttttggaagaggcaagccagaagcgaaaactgacccaaagcgaacagcagatgctggcgaacaaaaagaatatcctgtacatggcggaacaaaaggccattgtgggagatcagattgttcagcagcagcgactgaacgccttgcttgacaagtctaccaagtatcaaaaccagatggcggagaagaccaaggcgctacaggataccgccggaatgggtagcaaggagcaggagagataccgggccaatgcgcagatggcggctgactggaaaaacaacggcggatctttaagtgaccctggatttaaagcgatgcaggccgcaagcgataaattctacgcacagcaagatgcgcaaatgatgaactggaaggccgggtttactaacgcgtgggctgacattggcgaagaagttaatgacgtatacaccaatatcggggatatcactaaaaacgcatttaacggcatggcgagcgtgctgactgattttgtcatgactggtaaggccagctttagcgacttcgcaaagagcgtgatcactgacattaccaacatgcttatcaagatggcgctgtttaactcgctttctgccgcgtttggtggtggtggaacgttcagcttcgccagcatgttcagcaaaggcttttctggcggcggttacactggcgacggcgggaagtatgagccaaaaggcgttgttcacggcggggaattcgtattcaccaaagaggcgacgcaaaggttaggcccggaaaacctgtaccgactaatgcgcggctatgcaagtggcggcctggttggtggtaacgcaagttccggatctggaatcaccaacggcggcaacgtcgcggcgtcggcggctatggtgtttaccattggtgatattaacatcacgatgggttccggtcaggatagcaaggggctagagcagggcgtaaggcagatcgtgaacgatatgttcaccgaggctttgagccaaaacgggcgcattgcgaagttcgtcaatgagaaaacgaggaggtagtagtggattcctttaaatggtgtacacaaatccaaggaggggcggcgaaagtcgccgtatccaataacgttcgggcgatcagcttcggaaatggctacatccaaactgcgtcgagcggcattaacacaaagcgccggactgttccgatcgtttatggcggttcggattgggaagcggtttataacttctgtcaggatcacgtaacaaagccttttgtgtggaaggcaccggatggaagaatgggcgtgttcgtcgtaactgccgactccgttaaccttgcgccgcagggtggcggggtgtttgaggtaacggctgaattcgccgaacgcttcacttcagccggataatcaaaaagcgccctttacgggtgcttttttttggcctatgatctggagtcaattagaggagggcttacgatgacagccaatgtttcaaaagattttgcgaactgcctacaaaaacttttccccggcgagatcctaacgctgatcgatatcgacgccacaaagttcggcgggcaggtctaccgattccataacgagaacgtcgcctatacaaccgaggagcttttggccgcggttaacggcgggacgcttcagccaaagatgatcacgtttcgcggcgagcagtacggcccgcgaccgttcggcctgggcgggatcgcaatgtcgagcgatggcacagtggaaaagccaacgctgacggttagcaatattgatgcgcaagcgagtgctcttattcgagcctataacggccttatgcaagccaaagttacggtatgggttttggtcaaggaattgctacaaaacgacggcagcgttaaagagggcgattttaggcgatttatttactacatcgagcgcccaaaacaggtcgacccgcaaaaggcaacgttcgaattaacatccgtgtttgatatggatggattaatgatcccggcccgtctgacgcaaaccgtttgctattgggcgcagcgtgggtggtacaagtctggcaaaggctgcgactacaacgggcagaacggatacttcgacaagttgggaaacagggttgaagacccgtcgcaagatgtttgtggcggcttggtttcttcttgcaggcttcgttttggcaatgaaccgttgagttttggcggttgtgcgacagcaacattgaaaagtggaaggtaatatgttaactccgaaaatcaaaatgcagatcatgcagcacgcgaaagaagtttacccgcatgagtgcgcaggtctggtgacgcaaaaatcacgagtgcaaaaatatcaccgactcgacaacgtttcgccagatcctgagaaagaatcaatgcctgatgaaacgcagtatgcgctggcatcaatggagggcgagccgatcgccttcgttcactcccacactggcgatggggcaaccacaattccgagcgccactgatttatgcttttgcgatgagtctggcttgtcgtgggttatcgtctccatcccggaaggtgatatgcgaatcattgagccgaaacgccgacctctgattggtcgcccctgggctttgggcgcttacgattgctatggcctaatcatggattttcacaagcgccacggcgtcacactaaaagatcggcgattgccgttcgaatggtggaagccggaatacaaagagaatctttaccaggattactggcaagaggacggattcattgaaaacactggcgagcctgaagttggcgatatgatcatcttccagattcagacggaaaagtggaatcacgctggtatttacgttggaaacaataacatccttcatcacgcgtttggcaagctgtctcgcagggatatctattctggatggtacgagcagcacaaggttttaatttgcaggcacaaggagcttaaacatggcatcacatacaaagacgattaaactatccggttccctggggcgtcggttcggtgtcttccacaaacttgcggttgattcagtcgctgaatgcatccgggcgctgtcttaccaggttgaggggtttaagcctttcatgcagagcaaggttggtttaaatatgcgcttcggcgttgtcgccgacggaaaaccaatcagcgcgaacgaccttgcgacttttgccgtggcgagggagatcagaatcattccgatcccaaaagccagaaagaacggcgggttgttgcaggtcgttatcggagcggcgattatggttgcggccttctttactggcggcggctcgctggcggctatgggcgctttttcatcggctgcattcatggctggcggctcaatggttttgggtggcgtaatgcagatgatcgcaccgcagatgggcggcaatatgcgggcgagcgaatcgcctgagaataagccatcgtatgcgttcggcgggccgattaacaccacggcggcaggttatccaatccagttgccatacggttacagattggctggcggcgcattgttcggttctggatcttacgcagaagacaacaactaattaagccattcgctttttagcctgggggcgtagcctccgggctttttgtcgtgtacaattgcgagactattaacaggaggctaaacgatgactaatatcaaggcccgtaagggaggctcaagcaagccgcgtaccccggtagaaatgccagataacctgatctcaaaagacaagatcaagttattgctggctgtttctgatggcgaggtcgttaacgacttcagtttgaagcagttgcatttcggcggcgtcccggttcaaaacgaagatggaagttacaactatgaaggcgtgattgctgagtttcgccccggcacgcaaacacaggactacatccagggcttcagcgaatcaagtgctgagttccaggttgctcgtgaagtcactcacaacacgccttatacgcttaccgtatcgaacaaaaatctgtctgctattcgctttcgcctgttatggccgcgcgtgctgactcaaaaagataacggcgatatggtcggatcggttgttgagtacaagatcgagatggcggtagatggcgcaagttatcagacctacctaactggcaaaattgacggaaagaacacgactggcggttacgatcggagcattcgcgttaacctgccgcaaaacttcacgtcgcaggttcttatccgcgtgagccgagtaacgccggatgctgacggggtgaaggttgtcgatgccttccaggttcaatcctacgctgaggtcattgatgcaaaattccgctacccgttaacggccatgctttacgttgagttcgatagcgacctgttccagaaccagatcccaaccatctcactcaaaaagaaatggaaaattattcaggttccgagtaattacgatccgattaatcgcacatactccgggacgtgggacggtgtttttaagtgggcgtggagcaataacccggcatgggtgctttatgacctgatcatgaatcagcgctatggtttagaccagcgtgagttaggaatcccggttgataagtggtcgctgtatgaggtggcgcaatactgtgatgaacttgttcctgataatcgcggcgggatggaaccgcgctatttgatggatgtaattgttcaatcgcaggttgaggcgttccagttggtaagggatatttgttccgcgttccgtggaatgacgttctacaacggggaaagcctttcgattatcgtcgataagccgcgcgatccggtgtacctgtttacggctgataacgtcgttgatggcgttttcgttcggacgttcccaagcgaaaagacgatgtacacgtcgtgcaacgtcatgttcgacgacgaagaaaaccagtacgaacaggatgttgaaccagtattcaaccctgacgcagccatgcggttcggccacaacccgaccagcattacagcgatcggatgtaccagaaggacagaggcgaaccgccgtggtcgctggattctgcaaacgaacctaagcgccacaaccgtttcgttttctactggcctggaaggtatgattccttcttgcggcgatgtgatttacgttgcagatccgcattggcaatcggcctttaacctggtgctatcaggccgcgttatggaagtgtctggcgtgcaggtgttccttgcctaccgctgcgacgcgaaggctggcgacactctgatcctgaatacagacgacggcaagccagtgcgccgcacaatcgccagcgtttcggcggacggtaagaccatcacgctaaatgttgggtataactttgacgttgcgcctgacagcgtattcctgatcgagagcgatcagcttgcagcggaacagtatgtagtaacccggattgaaaagggtagtgatgacgacgaatttactttcgccatcacggctacgcagtacgatccgaacaagtatgacgcgatcgataacggggtaattaccgatggccgaccaacttcggttgtcgaccctgattcaatgggcgcaccgaaagacttaacgattagctctttctcccgcattgttcaggggatgagcgtcgagacgatggttatcggatggtctgccgtgcagtatgcaaaactgtacgaggtgcaatggcgcaaggacggtggtaactggaacaacgttccgcgcactgcgacaacgcaggttgatatcgaaggcatctatgctggcgagtatcaggcccgcgtgaggtgcattagcggtgggaatgtagcgtctccgtggtctgaattggcaaccgccacactgaccgggaaagtcggagcgccaaaaggcccgattaacctgtttgcgtcggacaatgagatcttcggcattcgagttaagtgggctatgccggaaggagcggaagacacggcatacattgagctttaccagtcgcaaagcggaaccgatcaggacgcaagcctgcttactctgattccttacccggcggctgaatactggcactcaattttgcccgctggctacgtgaacttctacaaagccagaagcgtagaccggatcggcaatgtttcagaatggactgattacgctcgcggcatgtcgtcgactgacgttaacatcatcacagatgcgatcctggatgaaatcctggatagcgacgcgatgaaggaactacaggaaaacgcacaggatagcgcggcaaaactcaatgactacgcgaacagcatcattcaaaatgcgctggcgaatgatgcggacgttaggaaaatgacgaaggagaacggtaagcgtaaggcagagatcgcgcataccacggtgctgattgccaacgaatcagaagcgagggcggctgaaattacgcaacttaaagcgcagattgatgaagatatcacgtcgcagattacgatccttaacgaagccctggcgacggaaagcgagacgagagcaacgcagattggtcagttgcaggcagattttgcggctgatattgacggcgtaaaaacaacaatgaacgctggttttacgcaggttaatcaggctattgcaaatgaaagtgacgcgcgtgcaagttccgaggcggcactagatgccaaaatcgggcagaactccgcagcgctaaaccagaaactcgactcgtgggcgaacgttaatggcgtcggttccatgtacacgatgaagttgggcttgaggtacaacggtcaggagtatagctccgggatggccctacagcttacctcaagtggtggaagcgttgtttcgcaggtgctgttcattgctgatagatttgctatcatccgtaatgcggcgtctggcgcgtacacgctaccgtttgttgtgcagaatgaccaagtgttcatgaataacgcgcttattcaggacggttcgattaccaacgcgaagatcggtaacgtcattcagtccaacaactttcaggagaatgttgcaggatggaggcttgataaaaacggcgtatttgtcaactatggctcaacttctggcgaaggttccatcaagcaaacgaaccagaacatcactgttcgagatggtagcgggcgcgttcgttgccagttgggtaggatcactggatcatggtaaaattaatgccgggagaaatcccggcttaaccaaaggaggcagacaatggcttatggttttcaatcatgggatgcgaacgggaaccccaacaactatgggatcgtccctgtttcagttgctggatatattgcattagcgcaaggccagaaaagcggaacgtggtattacaacgtcccgcctgggttgaggcttggtttcttttgggtcgcaaatcaagaccagtacggcacatcgaagaggcgaattaccgttagtggtaatcagatcgttgtttcagatgcgccagatgatgcgctggaatcaggcgtctacccggcgacgcaaggttttattgtcgttcaaattatgagttgatgattatggcagattacggaattttacttaccaatgatagcggcaatgtttgggtttcgcctcaaagcatcccactggcactactatcaaagcagagcatcactcttaggggtggtactaactccgatgaagtaagatcggtaacttacgacacgaatcacccatgcgttccgttcgtggtctttcatggatcttcgccacaaggtgcattcacaaaaatcaagtacagcggaaacacttgcagcgttgttttttcttttggtaagcaaaacgtatatgcggaggtttattttttctccgtgttcccacagccaaatcctggttatgggcttgcaatttgggatgaaaacggcacgctgattttgaccaatgaaaccagaacactttcagacgtacagacctacggcactggttttaatctaaacgtcactaacggcgggaagtgggcggttagtcctgttcagttaggcgcgatcgttggtgttgttcgcgatccctacccaagaccatttcagggcgactattgcgcagcggcattctttaacggctcaagcacgcaacttaccgcatatctaacgcaggcaccaggaggagccgccagcgatctaacctacgtcaatatgaaaaacacctgcatcgctattgattgcgcaagatacgactaaaagaaaggggccatacggcccctttttctaccccttgagatttttgatctcctcttttaattcatcaacttgagcagacagagctttgattgcgcaaattgcatccatcaaaagagcattattgtcaagcacaagtttcttattttcaactacgttaccctcatcatcctgataggatgcgctgctttctttaacgtagcacgaatcgatatctcgcacctgctgtgcaataactcccctacgctcgcgtttcttaacatcatccttataggtgaacttgaccagattcattgctttgatgttttcgagtgactgcaaaccatcataagcaacaacattgtctttgtagttaatgtcagatagaccagcaaaaacaacgttgccataagcagtgcttgcaatattaccatctgatttaaactgccaatactgcgtattaccgccagttccccatttgctgacctcaataacggcacgatgttcataacccctatgttcctcaagccacatagcgcaacgcgcaccgttaccattaatgttgaaccgtgagataaatgatggagatttaaggatatcaccattattcccatttggatcgctagttggccacgctacaaaagcatcattaacggtactcctcacagtcccatatgacacaacacttccgcgaagatcggcagccccgccaactcgcaacgtgctcgacattgtaacagcgccgcgaagatcggcagccccgtcagcacgcaacgtgcttgacattgtaacagcattgctaaagtttgcattcaacccggtaacagcaaagttcgatgcatcaaaaacaacctgcttcgcgctgttcatatctccattagggcggaagtacattccttgaccattttcagggattgagtacacgatcgcattgctgttatttgccctaatagtgcaaccgttcagggtcagcgtggcgtttcctccaggaacgctaattgcctgcggctggctgaacgtgttagctacgttggtgcgcgggatcgtattatcattagccatcaaatagtcagacggtgaattatatacaattccagaaggctccgtgtcaatccaggtataaccagtgcgatcaatgattggccccgtaatcgaccctttgttagcctgtacgtttacatgattcaaccacagttcaggaacccatccgccgggagcatgaatataaacatcaaacgaggagtctgtgtttttcaccaccccaagattaatgcgtctggtgtcgtttggtctggcagcaatcagggtgcgctgagtaaaccaagtgtcaatattattactggttagcgtatcgggaagaccgcggccagaaatcgaaaagatatcaaccgggagatttgcagtgccataaccagtacctccgccaatgatgaactgagcaaatgcgtagccatcaccagcgttcttgacgttggcgatcttcatccacttctccccagcgaaagtgccagtaattttatccggcacctggacgccagccacaaggtcgacaacctgatcacgaagattttgcgtctgccccttcgcagtttgcgcgtcgttcttcgccgagttggccgcagtttctgacgcttttgcattggtctccgaggttttggctgcggtttctgatgcctttgcattggtctccgagtttttggccgcagtttctgacgctttggcgttggtctctgaggtcttcgctgcggtttctgatgcctttgcgttagtctccgacgtcttcgcagcattcttggatgcagcagcattggtctctgaagtctttgcagcggtttctgatgcctttgcattggtctccgaggttttggccttattctccgaagatttagcgttcgtctctgaggtcttcgctgcggtttctgacgctttggcgttggtctctgaagtttttgcagcgctttcagacgcagccgcagccgtagcgcttgcgcccgcagcttcggaatctgccctcacctgatcggcaagactttgcagagcttcgaaatcgaagttcttaaagaagtcgacagcatccgcaatttgagtttcctgtgactggtagtagcgcagagtttccgcaacatcttgcgccagtccgtcaacggtcagcgagtcacttaacaggatcgcgtaatcgctagacgctacgacagcgccttttgtggtgatggctttaatttcagtatcgctaaccaccttgtttacgacggccatttgaattggtgacgacaaaaacataatcgtcgcaccagggcgaatcagcgaaagcgatgattgccattttgtgccagtcccggtaacggttccgtctgcggccatagccgctttgccttctctgtatagtgccatgtttttaagcctcattggttgattgagtaacgcagataatagcatcaatgaaccgataaaaaaaggagcctttcggctcctttagttgtcaaattagaacgggatatcatcatcgaaatccatccccgcattcccgccgctgttttgcggcttaggcgcttgttgcggcttgggttgttgaggctggccccacccggattgctgattgccgccgccgctttgcgaaggatcgcgctggctgaattcgagttgcggcataatcatttcgttgtggctgtaaattgtgccgttgtgctcgcggttaacgatctgaagcgtccggcaggttacgctgatcaccttatccatttgcagcgcttcgtcgtaccacttaatcatgttttcttttgcaaagaaaactgcgcggtagttcgtgtaaattgtttcgtcctcgccatcacgattgcggatcttcatccgctccgacaggtctacggcgtacattttccacggcccgttattgttgctgccctctttgacataaggcgcttttcggattacccctgttacaacatgcattgtcattcctatggggcggcttcccgcccgttaaattagttgaaagatgaaatatcttgcgcttctggttcaggttttgattctaccttttccggctcgcgcttcgcaacctcttgcggtttaccggggttaaatccgtttgccggggtgactttcagttctgcctggcgtttggtgatatcgtcttccgtcattttccactccgccggggttaacgtttgtttcgccagcttatagatctcacgaagcgattcgagatcttcgcacgcgtcaatgcgttttttgaagtctttcggtgtcattttcgtaatttctgcatcatcatccgcctgcttgatacctagcgctgcggccagcgcataacggcgggcgtaagatgttgttgagccgtatgcttgttcgacggttttactgatcggcatattgtactgaaacgccatgaactcgccgctttcatgcaaaaacatagtttcgaggtgcatcaccttttcggtgctcgtatccatcatggattgaatgaccataattttgttcttctccagcgccggggaaatagcgtcgaggatatccccaagattcgcataggtgttcccaagatggttgttcttaccgcttttctttgcggccacgaagccagattttgccttgattaatgcggctgcgatggtggtaaatttttcagatgtacgcatgataaagtttccttttcctaattggtaatgcgcactatatcacaagtgcgcaccagtgtttagctatttgtgccgtatacgtccgggaacatgtatttcacaaactgaggagtcggcaaaacaacttccgccgcgtttgactcatatgatggccatgaatcgtgcttcacgcattcagcatactgatgaatcacgctttgatactgtttgcgaccgatctcgatctgctggctggtcagggtgaacgccagcggagcaaacggtgattttttctcctgcgttagcagtctgacaactaccgggcgtttttcgttgtaagtcttcacgaacagatcgcgctgcaatgccatcttgagatagtagcccaagttgaaggcgagtcgcccgaaatcgtcaggcttggaagattgcgtggttttgtagtcggtaatcaccacgacctcgaaaacctcatccgggttgaacccccactccttgatgagttcgggatcggaaacaacgtcaacatgatcgagtcgaaccttaaccttgacgccgaagatctcaccgaagattgacaattcacgctgtgctgtaggcgattcgatacatgcggcgtgtcgcgggttagccagcatcacgctgcgcatttgaacaacggcatcgaaatcaacatccttaaccagcttgcgcccggagtttatcgcggcgctttcgtcgcacagttcaatagcccaccaaacatttacgtcaatcccggcgcgatatgccatttccagaagttccgggtaatccttgttggacgtcccaatcaggccacacgctttcagcttcgcagacagtgccgacttcgacgtaatcagatctttaacctcgcccggagaagtcgcccgcaggtactcgccattaaactttgccgtctcaagcatacaggtatgcgaacaggttccgaacgccagcgcggctgcttcctcacgcactttgaatttccagtgcgccggggatgttgcgtaaatctcgccgaggcttgagccgctaacgtattccgcgcaccaggagttaggatcgtggtaatcatcgttggataattccgcgttggtgtatgccttaaaaattgcttcagccattggtatcactccatttgtggtttcgttgcgttaagtatacgcatgacgattccaggcgcaagtcaaaaagtgctatccgcagttggttaaaaaacgagcgaaatttacgtaagatttagtaagatgcatcttacgtgatttttcctatatatttcatttagttaatgcaaatcggtaagatggtaatatccctataggtaaatatccatgaaaaatatggcgcgaaatccagcgaaaaaagacacgcaccccggagaaatcttaccaagattgatagatacagatagagtaataataataatattgttatttatcatatacttactatctatatattgcggttaattggttaaattttgcgcgaaatttacgtaagattcatcttactaaatcttacctaaagtggttcgaccagctgcaagccactgaatttcaggcataaaaaaaggtaagactgatttgctcaatcttacctaaattctggtcaacatttaatcatagaagcgacgatgccctgtacaacttgcgttcaaatccgagcttaaagttgtcaccgttcggaacgataactttaagatcccgatcgtcagcagccgccagcatatcccgatctccacgacggcaaactacccgcatttctcgcttaccttctccgccattgcctttatacctgtacgccacgatctcgacgtttgaaggtatgatgcaggcccaaacgtcgcacttgaacgaactggcaatattaaagtgcatcgcctcaatccaggatcgagcaaggtaaatcggcccgttaccgtcgtcgctctgattggtcactatcaccgatccgaatgtcagatcgccagccaacatcttctcccgaccctcctcatcaatgaacagcatgttgcaatactcatcatccggcccatcctcatgcactagttgcattggtagcgcgtgaattagctcctgtctgcagttctcgtgagtttttacgccaaccagatatgatttgatatgctcattttcaatgccctcatagagcgttacaggcgtgctatcgacggcctccgttctgtttaaaactgccatcactctttcatgatctgccatctttccgtagtcatacccgttatcacgagctacctgcttgtttctcttgactacgtattcttgcggaacctttccgagatagcgcccaagaatgttgatgcactcgctatacggctggccgcttaacttcattaaccagccgatccccttatcggcaccgcaaccgccacagtatgcgccgccatcacctcgcgtttccagcttgtcagtccagcggaatcggtctttgccgccgcagttcgggcagtcctggtgcttgccgttgaagtatcgagagtggatgccgcaaatgttctgcaacgcctcgcgccacatgccagccatgtacggcaaaacctctttttcatcgtaaaaatccacgtcgtaacccccaaataaaaaacgcctacacgagaatgataacccggcaggcgtttagtgtttagtcaaattgtgctatcggactacgcggagcatttcgcggcggtcgcatcggcgcgtcactggcttgccgttgctgtcaaatcttaaatcaggtcggcagaatgaggcgcgaaaacctttgcaattgttccgtcggtagctcttatgtactagataagcgccatcggctgagatcataccgcgcttacgccactgctgaacaacctggatactaactcccaactcttttgccgttccagcgataccaccgaaggcatcaataaccagctccatccgcgcagtcaacccagctcgaacctcatccttcagcacgtagtaaccagtcggtcgcttgcgtttcttcttatctttcccgcgcgacgttccgttgttgccgttcaaggttcgcttatcaaccattgccatttgctccataattcaaccctcatagcattttttgttaaacctgataaaatgttccatgtattatacacgcaactatgcgaatgacaaattaggattgacaatggcaagcacagaagaagacgtagcatattttaagcgactatttcgttatgaaggcggaacactgattcgcaaagttacaaccagtagtcgtgcattcgctggagactccgtagggtgcgagaacaacgttgggtatttacaggtaagcgtaaaaagcaaacccctatacgttcaccgaatcatttgggaaatgcataatgggcctatcccagaaggaatggagatagatcacatcaaccaggtcagaacagataacagaatcgaaaacctgcgactggtaagccaccaagtaaaccttaaaaaccaatcgatgaacagtggcaatactagcgggcacgctggcgtaagctggtttaagcgaggcggtaagtggagggcaacaataaaggttggcggaaggcaaatacacattggttacttcgcgtcgtttgagtcggcagttgccgcacgaaaagcagcagaaaaacaatatggttttcatgataaccacggagcagagaaaaagaaatgagcttatcgattgagcaacaaatagatctatacgcagacaaaatcccggcaatccaaaagagatttaccgttggaaatatcgttccgtatccatatcaggctgtggcttatattgagacagccaaaagaatagcaaactacaccgcaccgttttacattaaggcttcggtttccgccgggaaaaccatcatgatcgccatgctcgcagcgcagtgcaaggcaatgaacttacccatgatggttcttgctcgccaggccgagatcgtgaagcaggattccgaggagatcagtaacctcgacgttccaaactccgtttattgtgccgggttaggcacgaaggcggcatacttcccgatcgtcgtcggatctgaagggacggtggttaatggcctgtttaaaatgctgggcgactacgtgccttcagttctggctattgacgaatgccaccaggttgactggcaagatctggcggaagcgatcgccaacaatgaatcgttcgagtacatgagccgaccgaaggataagccgtatcgcgtgaacggggaactggtcgatgccgaccacccatacgacgaaaaattcgacgacgtagaattcggcggcggtcgcacgcagtacactatcgtcatttgtgagttaatgcggaggtgccttgagaagacagggcgagaacttcgcatcgttggctatactggttcggagtttcgcggcgtcattccgattttacaggaagacaagagccagcctggtttttggcgcgagcagatcaccgacattaacacaaactatcttgtcgagttcggatcggtggttccgacaatttttggtgatactgaatccgaagggttagggtatgacctatcagaattccacggttccagtcaggacggtacgcaggattttagcgcggaagaattgcgcaagatggaaaagaaaatccatgaatccggcgaaatgacgaagctgattatgcaaaaggtcgtggagcgtgcgaaaacccgaaacggagttctgataacttgcgctggacagcggcattgcaaggaggcggcgagctatctaccgccggacgcaacatacgcgatcatcaccgaaaagacgaactcaaagaaacgcggcgaaattttggataaggcgaatcgcggtgagatcaaatacatcttccaggtgatggccctaaccactggcgttaacgttccattttgggatttttctgtgatattgcgcaagatcgggtcgcttacgttgcttattcagcttttggggcgcggaatgcgacttctgaaggactggcaaaaacagccgccttactcgtgggtgaaagaagatcaccttgtctgggattttgccggaacaatggatgacctgggccagttgtatttcgatccgatcttggagcaggcgcaataccaaagacgcaagagcagcaagaacggcccgaaaatttgcccggtatgcaagggggaaaatagcgagtacgcccgcagatgcattcacaaagacagtaacggcaatcggtgcgaatacttctggatctcgcagaggtgcgaagaccagaaagacccgcgaacagggaagattaaaatcaaggggtgttacgctgaaaatgatattgttgcccgccaatgcagatgctgcggcgttcagcttaaagaccccaatgacaatctcaccgggaagcactatacgcagaatgactggtatgatgttgtctggttcgatatcggcttgactcgcaatcagtccgggatcatcttcaattacgtgttactgaaccatgacggcgagcgattcaccgcaagggaaaagttcttcccggaatcagagaatcagatttgcggcaagctgtggcggcaaaaggcagtcttccagcacgttagcgacgcggtaatgcgtggcaagttgggcggaatgaaaaacgcccgcaagatcctggagtatgcggaatacttccgcgcgccgaagcgcgtaacgcatcgcatcaacggcaagaaggaggacattatttcccgcaaagactttggaggcgaggagtgattacagacaaaggggattacctcgaatattacggcgggcctgtaaaggcttgcccacttgaaaaaatcgaccagatgaacagcgtttcgtggctgcgttacgaataccccgattatctgttctggcatacggttaacgagggtagcaagcacaaggcgagcgcggttatcgatcatcaaatgggattgcttaaaggcgttagcgacttcgttatcctgattggtttcggtggcaaatacccgttcgcagccattgagctaaagcgccagggtaaggcgcaggcgtcgccagtgagcaaggagcaaagggaattccttgctgccgcccggcgtcgcggcggattcgccgccgtggcctatggcttcgagcaattcaagattgctttctgcgatgccataaaatagcactttttgttaaaaccgcccggcgaaagccgggtatcatttccacatcgaaacgaagaatggagtgttgaaaatgaaaaagatgctggctttagttgttctgtctcttggtcttattggttgcagcgaaaaaccgaaaacatatgattgcggtggtgaagcgtttgaggtaactagcaactatatgaaagttgtcaagggtgaaaactctggcgttataattgatggcgctggcgaaaatcaatataaactgcttactccttttgggtacgctcattatgcagtcaacaaaaacactattgatgttagcgtgggcgcttttcacaataccttaacctgcgaggttaaataataatggcaaaagatatcgcagacaaagacactcatgacgcattcatcacgtttgagcaattggagcgcgaaacgtttattggcaacgcccttgccactggcggacactatcaagccgtcaggccagataagttctatcaggtaactggcaaccgatacgcaggtagtaaaacgccggatattgtgcgcgacaagtgggcgacagatcgaagtctgatcgcatacatggaagagcgttacggcaattacgatcttgatgtcgccgcagaccgaagcaacgcagtttgcccgaagttctacgacgaaaaaacggattgccttaaacgctggtgggggaaaaacaagcacatttggctgaatcctccttactcgtttccagatccgtttattctcaaggccattgagcaaatggagcacgacaaccagatcgacattctgctacccggcgacaattctactgcctggttccgtgacgcgcagaagatggccgccgaaattatctggattgttgccgatgttgaagaggatgattacgggaacaagttaagtcgatccggtcgcctcgccttcatcaatggattaagcgggaatccagtcgacaacaacaataagggaagtgttattttcatcatgcgcaagctcaagccgggagaggagcaaaagacactttacattccggtaagcgagatttgcccgtcattagctaaaaagcgtatgcgcaaacgtgggatctgaaaaatggaacagacagagtctttcgccgagtatcttcggatcgttgttgaacttctggacaagcacggcttcattgggacggatgaggaaaagttagcctttgctgacaccatcgacggaacctacatggagttcatggacaacggaaccccggtcgctgactggccagaaattcttgaacgagaattgattgagtttaaatcacatgaaggcgcggagtatttcgcaaaacagcactaattgctaaacaatacccgccgcgtgcgggtattattactccaccaaccaatcaggagcaaacgccatgaaaaccaaaaccattgcagacaccatcaagatcgtaccagtaaaagcgcaagtggtatcgcgtcaactggttaacctgtctcgcctgtgcatggccgactacatggcgaacccttcagataattgccttgatggtgtagtcggtgagatttattttcgcgctggttatggactggaaagcgtggccatgtatgagcaaatggccgaaggtttttgcatttacggtgacgaatgatgattgtcgagactggtcgcgctgccgtatggcagcacgcaaaagaagcgggaataagtgatgatatcgtgaagatctcaaagtatttcgatatcaaagatatatcaattatctttggtgggaagctcacctatctaaacgagcgcccggtgaagcgcacgcgaatagcagtggcaacgcgtgcggaggccgacgcgctgaagatgttcatacatgagtcgaaacagcagaaaaaatattacaagtagcgggggcgtgaagaatgcgatatattgcgatcctatttacggcgatcctgttcacgatcgcaatcatgaactgcgcaattcaattaggataaattatgttaccgaaaatcacagacgaagaattcttagccgcccgcgaggaaggtaagacctaccgcgagatcgcggaagagttcggcatgaacattcgaagcgttgaacgtcgtggcgttcgcctggcacgacaaggacacctacacggaaacgcccacgtttcgaagcatatcccggacggcttcggcgtcaaaggcacgtcgacgatgattcgcgcggacggctccgaggtcgttcggtgggtcaagtcggaagtagacagagatcgcatggtcgcgcttatggaggcggcgcaggcggctttctgcgaagaccttccgcgagctgaaccgcaaccgctggatgagtcgaagttctacattgaagatcagcttgccctgtacccaatcttcgacctgcatattggggctatggcgcataagcatgaatgcggcgagaactatgataccagcacggcagagaaggttctaaaccgcttctttgattattccgtgtcggtggctccgcaatccaaaaaggctgttttgctggttggcggtgacttccttcacagcgacggcctggacgcagtaaccccggcaagtggtcacgttctcgatcaggacagccgatacgcaaaacttgtttatgttgccatccgctcgctgcgtcgcgccgtgtcgctactgcttaacaatcatgccgaagttgaagtgcaggtaatcgaaggcaaccacgaccaggccgggatgatttggctacgcgcagcgctggcggcgttctatgagaatgaaccgcgcgtttttgttgatgttagccctgcgatcctgcatcgcaccttgtggggcaaaaccatgctgggctacacgcatggccacacgatgaagaagcctgaaacgcgccttgctgcgatggctaccgacttccgcaaggagttcggccagtgcgactacatttacacgcattccggccactggcatcaccagactgtaacggaacactcgttaggtattgacgaggtgcatggccagttaggggccaaagacgcttacgccgctcgcggtggttggcgctcctatcgccaggcggcggttattctgtacagcaaagaatatggcgaagtaggccgctttatctaccgcccgaacatgtaaccacaacggccccgcgaggggccaacaaggaaaaccgatgaatagaaatatctgcattttcgatctcgatggcacgttgtccaatggcaaccaccgcttgcacctgctgccgaaaaaggatctccaccttacagaaagttggagtgaatttaatggtgcatcaattggcgacagcccaatccaaagcacaattgatgtagcgaatgcgcttcatcgctccgggatgattgtcgttatcctgaccgggcgatccgatgaggtgaagaccgaaacaatgatttggcttgaccgttacggggtgaaatatgacaggctcatcatgcgtcgcgccagcgacaaccgtaaagacacggtaatcaaggaggaggagttacgcaaaatcggaattgatcgcattgttgcggcatgggatgattcacccaatgttattgcgcacttgcgcggcctgggtattacgacttaccaggtctgcgactacggagacaatcttcaagatcatttaaaatcgcacggagtagacaaatgaaaaatgtaattattctcaacggagcacccggaatcggaaaagataccatcgcggaaattatctcgcggaagtgggaatacaagaaccttagcttcaaacagcctatgtttgccatcgcgcgtgctgtgcttggatctactgattttgcacgctttaccgccagataccacgaccgcaagcacaaagaagtgaaatgcgattttttgggcgaccgttctccgcgtgaattcatgattcacattagcgaaaacttcgtcaagccgaccctgggcaaaaatcagttcggcaagttgctttgcgattcagcgctaacttcgccgtttaactgcatcgtcagcgacggcggttttgatgaggaggtcgagcacgtcgcagcgcatgaggcgcttaacgtatttgtcgtccgccttcatcgtgacggcatgacctttgagggtgatagccgcaaacacattcgacgacccgatctgatttgtgacacgtatcacgaacttgattttgatatgaccactggcgagcctgaagacgacgcgcaaaaaatccttgatatggtttcagatgttgcattaaaattataaagttaatgcctttattatcaccaccttaacgattgggaaccttgacgggttcccttttttttgttcttaattttgccaaatgaatatatcatcaccttaccatttaactaacagaggttgcatatcatgcgggaattcatcaacgcggcaaccaatagcagcggcggtgttgcccttgcgggatctgcatccgggcaattaatcattgctgccattggtttatttttcatgatcttatttggctcaatcggcacgtggctgaagtggaaagactcaaaagccatccgggaggcgattgattctggcgacattaaagaggcattgaggatcaggagcaaataaaatgggaatgaaaacgcggcttactttcgcggcggcggtggcgatcgcggtcgcgttcctccccgaagtggaggacactaaatacacggtttatacggatatcgctggcgtaccaactgtatgcgaaggaatcacaggcccggacgttatcaaggggaaaacctatacccggtcagagtgcgacgcgcttttaaccaagcatatccaggtagcaaagcgaaccgttgacagcaaaatcaaagtagatgttcctgacaccttcagggcgtcgatgtacagcttcacgttcaacgctggcggcggcgcatattctggcagcaccatgctgaaattaacgaaccagggccgattgcgcgaggcgtgcgagcagctatatcgctggacgtactaccgcaacccgaaaacgggtaagatggagaagtcaaaaggcttgcataatcgccgggttcaggaatatcaactatgcattaaggatctaaaatgattaaggtaattggtgtggctcttacggttgttcttctgtctggttgcgcttccagtgtcccgatcctttccgatctggtgggcagcaagccggatatgacggcgcaagtaggcgcggagaacgttaaacaggcggttggcgtgacgaacaaaacggacacgtcaagcaagcaggagactacgttcaaagagtcggcggtaggaaaggttgacacgtcgaacaaaaaatccgtaacgacctccagcattcacgccaaccagatcacggcggacaagatcgagatccgaaacgatgaaagcggaagcctgactccgtggctgattggtggtgttggggttgtaatgctggcgataggtgcgttcggtctttggcgggaacgaaaaaacaaaggggcgtaatgcccctttttctatatgtaccgcttgacgtgcaatagcgctactccgtcttcatcgttaagaccatgttcaaccgtgttggttgcagccattccttgatagagcaagatgagcgcggcacgcaagtaattttctggtgtgatctgtttcacacaaacaagcctgtgaacttccgttatcagatcttccacctggtttcccgaaaagctgttcatcactgagttggtcaaggtgcatcatctcccatatgtatcggttatccatcccttcgaacgaccggaaatcaaaacctatttccctgttatccggccccgtacaccacacagagccgttttttccgtcaaggtatccattcgtatagcttcgcgctaaaaactccttagagaccattgaggcgaacatacgttgcgatacgttggcggcttttgccagtcgaggcgcttcgcggtgcgtatagacgaacttcgcaaaatcctgccgggtgaactcccggcgagattcgcagaacttgtaaatgtcaagaataaacatcaattacctcatgaacgacgggttgataaagacttcggaatccatcacgcagataaagcctaattcctccatcttcggcaataagcgttccttaatctttttgctcaccccggcctggcctttgaagatcttcaggttgcggcaggcgttataaatgccctggacggtcataacaccttttgcctgtttgcagcgactggcgataacgtcatacatcgctttaatttccgctccctcaccagcaaagccggaagagtcagccgacgacaaatacgttttgctcaattcatggaacataatgatcgcttcgtcaatggtcgccgtgtcgatcttcttcgagcgcttcccgccgggttgccagttccggatcgtgtgaatcacggacgccagacgcataacctgcttatcaaacttacccatcgcgccgcgaagcattgtatgcgaatacttgccgccgtcgcctaactccggttctaactcctggcgggccttgttcagcctacgcattgccgcgtcagtaacctgcaacttaatgttcgactcgctcataatgtcatgaatcagccggaagtaatccgccttcagtgactggtcgatcggctcataggtcgaattcccgttttcgtcgatgaacacgcgttcacccaaacgggtttgctcacgaaccaaaaggaagcgttcagataccccgatcccgcgagagccggcctgcataatggcgtcgatggtttcatcctgggcaattacgcaaatgcagcccaaagcctcgaatgacatattgttgctaacgtcggcacgagcgatcgatacgtggcctttatcccatgctttgagcaccagttcgctgttcgtcttcttaccgccatcgtttccatacgtgatccctaaaaggctgttaaccgccgtcgcctcatcggaaataacggcaaagtttccctgtcggttgttaatcttcgccagaccttccggggtggtatcagataccgggaaagttaggtcacacaatttttctaacttctcctcaagttcgtcacggtcttcaaaaagtttcaccatatcagattgcgataactccccttttagcgcctgcttgttggcggacagcttcgccatgattttcttacgctctttctttcgagactcgttaatgcgttcgacttcggcgacaataggatcgatggcaagcgagttaatggcagacttaccagcggaaggcggctgcgacgtgataacgtaaagcgttgtcggttgctcgctgccgtggtactcgacccaaaagcggcccatcatcgcggcggatacggttccgagaaagtgcatgtaagcggatgattccgggaactgaacagaacgcgctgcatttagcgccagcttgccgacaacatcataatcattggcgatcgagattgttggatacttatccgcgtttacgtcgatatctttgggctttggccagaatgaaacggagtcacgatacccgttcgcacgaatcgcaacgcgcaggggactgatcccctccctttctgcgatggcgataatatcttgcggtgatacgcggtcatttaaaaacatgcccttgctcctgattggttaatcgttcggctaatcatatgccgtattaaatccgagatccagtgataatctaaacacgcttgaaaaacgcgcttggattatcggggcgcatggccccgaacccgtcacaggtatttagcttcgaaagtcgttccgtccgatacactgaagccaacttcctcgcggtacagcgtccagcggcatccatcacgatcgaagatgtatccggcaaccgcgccgagcgcacgaccgctttctacctggtagcgcttgccgacgctgaaggattttttcatcgggttgctatggtcaaggccgacgcattttagcgttttggtttttagttcgatgaacgtcgcaatcacctggccaccagcgccagcaataaacaactcgccgctaacgcctaccgacaaaataacgcgcttcttcttcagttcgacgctgtcatataccatcattgacacattgccttcatcgtcgacgcgggcgggataaaggttattttcgtgtatattaatagcgcggcttgacgtgcatttaatcttgattgacttcgccatttattttctttctccgatctcgatgtacaggtttaccaaatccagaaagtcagccttgcttttgcaacccaacttaaagccaacgtgcgactcaattttattttgcatcgcagccagtgttgcgccgccattattcatcctgagaacttcgcggcatacttcggcgagcttttgagatatcatttcttcaccacctttatttccatgccttcgcaagcgctcttgatatcattaatcagacgattaagccttaaatcagtcattacatggtgatgacgtatatcaataattccagcaacgactaacagcatgacggcaaagataaaaccaccaggcccggacatacacaaaacagttaacatcatcaagataataaatttcatttccgttttactccgttgcgtttcgatggggtgattctacccgactttcgccgggtagttttagaaattcgtgctattctcgataattcgcctggaacacggcgcgggcaaaacctcgcggagtaatggaacgcagcattttagtcctttctgaccttccacccaaaaacttccaggcccaaaagaaattcacgccttctactccatccggcggcgtgagccgtttcggttcgacaaaaccgtttccgtgccatatgcacgttttcttcgtgtaattgtcacagtggggcattttgggatgccacacaggctcgttcggagaaacatagccaccgaagtcgcgcggatggaaataaaaatccggctttcgccatagtgacgataatttcccgaccgggttttcgaccatccaggggcaaccatacttattgcctaattgctcgaccatcttcgcatcccctgctgcggataatacgtcattatcttcccttacgtgcttgattccgctatgcgctaacagcgtgcatggcgggaaagcgaaaatgaagtcaggatctggaatgccgagaatcgatcgcttaacgtcaaaatccttgtcaatccaaatgttaacatactggatatttgggtgaaccattcgaatgctatattctccgtggtcgccggagtcggcgttgaaacagtacaccttgcatcccttgatggcccacggcaggcccatgatgccggagccgtcgaacatgcagtaaataaccttttctttcatgctttccacgcctcaatgaacattctgttcgattccagcgtcagcgtgacgccagccagggaggactgaatgagacgaccgcccggaaccgtcccgatgatgtagcggcctttcgacttcgtgatcgtgatctgagtgaagccggaggcgcggttcatgcggagaacgacgcggccatgagcgttcaggacggcgagaatggaatcagtcttcggatggttcattgtgtagctccttcgtttgttggtatggggacagtatgccactatcccgctgtgttgttttagcaaaacgtgctattccggaacgcaggtcgcgtaatcctggctgatgtagatcgtgcgctgaacgcgaggttcgagatcaccgagttcctggatggtaacatcgttgcttcctacccggcacggaaccgatccgaaaataaactcgccagtctgcttgtcgttgatttgccatacattaccgccttcctttttgacaaccaggaaaggcgcactgtctgcactgaactcttccgggccacgaccgtagtaatgcgtgatcgcagctttggccgcagcgctgaaggcatcggtaacgtcattggtcgccttgtctcggatggccttgatacgttcttcaggcgatccgatgatgtaggaaaagctgttcgaaatggtaactgttcgcattatattttaacctcgttttggtggatgaagtcggcgacgtaatggcattcgatcgggttctcgatacccgccagcacctcgcaagacccgttattcagtagctggcaatgctggcactccgcaccgccaacactggcaatgacaatggcgatcccgttgcatgaaccgccgaacattcgatgagggaagtggtaagcatcgcaggtgcaaaccacctccccggcccgccgtttcctcatacctggcccttctcgatgcagaaaacccaatcacgagcgtcaaccgcaaagcgtgcaacgccgtcgagcaccacgaagacagtaaacccgttgacgccgcgacccttctcgatatcggtcacggtgcggaacagatcgcttgcgccatattgaattttatccccgacgactacatccgcaaatgctttcatggttaatctcctgactggtttcgatgggttaactataccaggcctcgcggcccggcgtttagcaattcgtgcttatttcactgctttcttcgctgccttgtacgcctctttgaaagccggaacatcttcgaccggaatccagaagccggagccatagccatcgtcatagcaagggcattggtcgcagtagtcgccccaggttttctcttctccgccgacagagaatccagtgggcattttgcataacgcttcctcaaccgcttcgatcttgtcggcgtcgctatccatgataacgaagttccacttgccgttatactcgctgcccaggttgattgattcgcgttgaagtttcatagctttagcccctttggctcaattcgtttcgttgaagtcatcatagcaaagccgatcggatggattttaacaaaaaatgctattcctgcgattgctgattattccaccgattcggaatagtggaatagatggtgattgcacctgattccctggtgattagttttgacgaatcatgattgcttttgattgtttcattttgtgcaacgattttgtgagtgtttcaggatttgcaacgaattgcataaatgtatgcaccatgcacgcaatttgccgatcgaagccagcaaaagcgccaggtgtttttcgccaacatttacgtcgtgtggaaatgtgggggaggaataatcttacctaaaaattgcgcaaaaagtgaccaacataagcctataatagatatataagtatatgataaataataatattattattattactctttatctatatatatgtttggtaagatttcttcggggaggttatggattcctcttgcgcaagccatagtttttagatgttccgccgcgaaaaaatgtatatagggatatataggggatgacagcaaatcttaccaaacacgcttaaacccttttacggcaaggcttgcgggtggtaagatgacattcccacacaagcaaaaacgacgtaaatgttggagaaaaacacatgcaatataaaggctatgagttcgaagaagtcgacgtgtccgagtggatgcagtacgacgcagataagcaggcagcttaccatgaatggctgcaatccatcacgtttggcggctcaccaggggtagacgatcggccagttgctgaaaagtcacccgccgcattcactggtaatcgttcgtccgagatccggcgcatgttcctggatggcgggcgacgtatccagatgacggcggaggagttcgcggataagttcggcgttcatccggtcgacaaccatttccgcaggccgttgctgaaactcctggagccgggagaagtgttgcgggtgagcctgggggcggggttgatctccgtctttaccgagttcgacgcaatgactggctcaaacatggaggctgaggcatacaggcggcagggcgctatctccgagagggaaaggattaagggtttagtggccgctcttgctgtagactttgccggacatgccctggccgggatttacaaggcgaacttgttcgcggctatcgatcttggattgaccgccagcgatatcagccaggaagcggccaccacgcaatagcactttttgttaaaacccggtcagagcgatcgggtattgtctttccatcgacaacgaaccgaggaaaacgaaatggtcactcttatcacatgggaacacgaaaacagcgagccagtggtgcgcgaattcgagaccgtagcggcatgttacaacctggcggcaaatggtggcttttacaaggcgcagatcgttaacgagttcggggttgttgattatgaattttaaggcgagcgacgtaaaacctggcgtggtctacggatcgcgcctcaataaccgcctttggcggtgggacggcgaaactatgtggactaaaggcgagggcgatgttatctggcatgaatgcggctggccataccccaccatgagccgcctcgatatcgcttattatctttcggttggcgatatgcacgagatggaagatagcactttttgctaaaacactgctgtcgagatccggtattatttattcatcgacaacaaagaggagatgaaaatgagcaagaagaatccatattcaaccagcaactaccataacgaacacgtcatgcgctggcactggcagaaactcaaagaacgccaccttgcacgccatggcaaataatcacaatagcgccgcttcggtggcgctgtatcccaaccataaaaacggcttacaccaggaggattggccatgccacgattttcagcaacaacaaaacttcgcaccttcgccgggatgccgatcccatactcatcaaccaaagccgtccagggcagcgagcacggcgtatacttccactggtgcggcaagtggcgcttcaccgtcattcgcggcttttacgtgacctgcgaccacgtggatattaccgactattccggcggaaaccaggttcatgagttcaataggcacgaatagcactttttgctaaaactcgatcggggcaatgcgttattattaccccatcgaaacagaggagcaaaaaacatgattggcaaccacaacaacgaactgaacgcagcagcccaccgtcgcgccgtcgagcagaacttcaacgcgcttaaagtagcctgcgatgagatgaaagcaatgcttgaactgccgtcatgggatccccaactcgaagactattacgacggcctccgcgtcaagcgtgacgatatcatcaaccgcctgcgcctggctggaatgtttctgtaaggagaacgcaatgattcacgaaattaagtctggaaaacaagtagtggccaccatcacgcagcgccacgttgtagcatttcagtttaacatccccggcaccaacgatatgcagtctcttgacgtgccagtttgggctaacacgatcgccattgatgccgacggctcgatttgggcctacgagtcgaccgccgaggatgtttgcatcccggactactcgcgcaaagcctgggtggattgtgggccttccgaaaacaagatgcggtcagtaggggagatggatcgcttccatgattgggcagaatcgaagattgaccttcgcggcctgaaatagcacgcattgctaaacgcccggtcaagggatcgggcataatcatcacgaagtctattaacaaaccgattatgcaaggagacagaagaatgcaacaatttgaatctcgcggcaagacatacaacctgccggacactgctacccatgccgcccctggtgcgtgcggcggcctgtattttaaggatggcgatagttggtttttcatgggggatgtggttgggggtgtaccgacgaagacaggcagcttactcgtgggcttctacgatcacgacttggtggagttgaagccaaagcgcgtaccgttcgctttctggaaaaaaatcaaaggggcgatctttaaatgaatcaattcgaattcctggcgcgtgcgcaccgtgcgcttgcaatgtacgccttcagcaagaacatgaagattatcagtgttgaggttgagttcaacaatatcagcatttccggctacgttggcgactcataccacgtgacgaaattcagcttcccatcgctggcttgcctggagcgtgaggcattcggtttctgaatagcactttttgctaaatgcccggtcagcagatcgggcataatggccacacaccaaacaacggagattcaccatgattcgcactaccagaccactacccaataacctttacgccacgattggggttcgcgcggtgagacttattcacatcaacgaagttggcaacgtggctattttgtggtttaagcgccactcaagcggtgttggcctgagcattcaaagattcgggcgctttaacggcaactcccaaacccattctcattgggttgatggctcatactgctggacgcacgttaagcacgtcgagaacttcgacgccaaatcactgagcgacgacgacgcctggaagatggtaacagacctcttcggttatgatgcctgcatggaggtagttggatgatacgtttatcagacttcgatcgccactgcttaaccgggcaatttggcgaaaagccagtaatgtgcaagatctcgaaggtaaaaggcgaccccgtcgagcaggtcaatacgcttaaaggcctggcaatgcgcaaccgactttacatccatgtgcgcggcagactgttcgcacagcaggttcatttttcgcatgggacgtggttctacactggcggggacggggttggcccatcgcagaaaagggttatgctgcgcgagataatcgaacacggttacgtttggactaacgggatctactaatggaaacggtaaaagtaatttgcacgcacgctggctattcgccgctatccacctatttcacgcctggccgcgagtatgacgccatgttcggccccggccttgatgaagtgtggattttgcaggacgaccagaacaccacggaagacgaagaattttggccagcctgccgcatgccggacgaaaagatcgccatgtacgccaataggccatacgaaaacaacgttttgtttgaggtgaaagtatgaaagtaagcaaaaagaaactcgcgctgtattgggccttcttcctggctggccttgccctgcataacagcgtgggctggcagacgatcggaatgctgtgcatgattattggtgtatgccgactgtctgagattaacgggttccgccgtggatatcgggcagcattcagcggcgaaaaagaatagcactttttgttaaaactgccgtaacgtcatttgataaagtggcgttactgaagtgaaacaatccaatcaggagcaacgcaatgaacgataatttaatcgcactgctggaagaactgaattcctacggctgtgcatacatcgagctttctagcgaacacgttatcgaagtcattattgacgatgacgcagggttcaccaagttaagggtggctaccggggccgaagaggaattcgaagactgcggcatccgtgaagtaaccaaccttctcgaagttcaccaggtgaaggagatccgctaatgaaaaccgtcaaactaatggttgtcaatgcggcccgcgaacgtgaacgccaccttatcggctgcgtattcgatgccgtcgaggtaaaagactcaaaaggagactttcacgtaatacagggcggataccttaacgaatttatcgtcaatccgctggatactgacgaagatttgaccatccgtgttggtagcgagccggaaaacgcgcttttccacctgcgtaaagtatcgaaggcatcgcagcgcaagttgctggttcgcgcactgaagcgcatagcgaagcagcgcggctacaccgatgcatacatccgcaagttcggcacgttcgctggagtaggtgattgggcgcggtcatgggccgacttttatttcaacaaatccggcgaattttgttcagcgcatacggactggctgcatggcacggaacacgatccagttaacggccacgagtggtacgaattcattgaggcggaattagacgccctttgatagcacgaattgctaaaacgaacgtccggggatggtgcatactatccccacactaacgaacaaaggaaattacccatgaacaaaccaaaaatcatcctgatcccgtccgtcgattccgtggttaatacttatgctaaattcaccaaaggcaagcgctataccgcaaccgcatttaccaaatgttccggcgaaatgctgtacaaggtcagcgatgactacgggcgcgagtatcacgtaaacccaagatcttcgcactatcttggtggccatcgcttcgatattgagtacccgatcgaagattgcagtaagcgcgactcgttcacctacgatgacagccgttctatcgccattcgcgctgcaaccatcggggacgggtttattagccgggcctgcatcgttgatctgatcccgtccgataatcacgccaaagacgacgccgacacgctgttaaatgccgtcgttcgcgccggaatcggcttggagttaagtgatgcgtcgtgcgaatcattcatgcgtgaaccgttctcacgaatcgcggagcttgaaaagcaagttgcgttcctgactggtgaacttcaggccgcaaacagcaagatcgagaatgttcgcaaaatcatgcgtagcaagcctggccatgacattgaagattacgcgcgggttttgcgcatgatggccgacgcattcgccaaactttagcagtagcacgaattgctaaaacagatcaggggtaagctggtatagttaccccatcgaaacgaaacggagttacagcaatgaaaatcaaaatcaccaaaatcaacactcttaacggcgacggctcaattaccctggaagaatgcggcctcaaaatcggcgaagttcttgaggtcgacggccacttcaacgacggctcatactgtgtgatcgctccgcgcaatagcgagtttatccaggctggtgacaatatcagcgtaagcgcagacgaatgcgaggttgtggaagaatgagcaacaaatttgggtactgacttacaccattggaaccaacgaggggcgcaaatcgcgccgcctcatctgcgacaccaaagagcgggcgattaggcagcaaaccgttcttggtggcgaacttgtcgagtatctccgcaagcctgaagcgttcaaggtgaactggccggaaggcatggatatcaacggcgctttagcgagcctgcgtgaattgcagaacaacccgaagacgtggagcgactttcaatgcctgcgggcggagccggaagtgaaggccgaccagttcaccaatgttcggtcgcagcacgcggagtggtcggatcgccagttcggcgacgttgggccagtcgggccgctcaaacacctggcgaaagaggcgatcgaggccgccgaagcgccggatgacattagcgagttcgctgatatcctcatgctggtatgggacgcaacgcgccgcgccggattcagcgatgagcagttggctgaagcggtggcggaaaagctggaacggaacaagcgccgggcgtggggcgaggtcaaagatggcgagccttgccaccacgtaaaaaattaacgaaatcgaatgccgtttaaagcgcctgtaagccattctggctggcgcaaatttaaggagtacgattgtatgcctgaatactcgaaagtcgaagatatgccgattggtgcaacaattactggtatccgcatgagcgagtcggacgacgccatcaagccgctggcgttcccggttacgcaggtggagacggacagcagaaaagggttcatcttcatctacaaaaatttcaatagtccgctgcgggttgaagtattcatcgctcgcggaacctgggtagaatgggagaaggccaaatgttcggactgaatgaagcgcagtacaacgccgtaaagcgcatagcaaagcagatggccgcagaaacaaaagacgccatcaagaaggacaagaagacctacgatcaggtcgccgcgaagatgatcgataaacattgggcgcaaatcaacacgctggttactcgcggccagtttatatggatagctggctacctggaaggccgattcggtcgaagggatggcgagtatgaataaaaaacagccaaacgattcagtgacctattgacgcaatcgcgctgatcgggtaacgtgaaccatgtagacacaagaggcggtaaacatccgcaagcctggccccggttaggggcgtttacataggagttatgatgcaatataaaatcatgctcacagcaagaaaaatgggtggcttttgcaaatcctgcattcaagagttcagcatgactattgaggcgaacgacaccgccgacgcggtagagaaagcaaaaaagcaatccggcgtaaatctggatacgcataaaatcaacatcaactacataagggaaatcagatgatgctaactgtgattattgctcttttaatgctttttataggttatcacgtcggagcggctcaccttgtagagcgactttcaaagcgggtacatgaaggcacctttgctgccatgatgtacaataagaaaacggcacgttgggaaaaaattggcgatccggatggtatcgcaaaacgaattgctttttcgccgcttccgtatgttgactgtgagctatttgtgaaactacagaagacgctgaatcggcgaaacaaactgatatgacaaaagaacccgcttcggcgggtttttttatgcccgcgatctgatatactcgcaaatcaacacagaaggaggattacaa

SEQ ID NO: 247 - DNA, 49478 bp, synthetic construct
  source 1..49478: mol_type = other DNA
atgtctgaagaacgtagaaagcgcgtaacgaaatcgcactttgagggaaacttcaaagcgctatatgaaaaggaatttggcgtcgtgctggggcgcacggcagaaatgacgccagaacaattttttgatatcgcaaagcgttacttccagtgggccgaagagaacgcaatcaaggcggcggaaacggcaacattccagggcgacgttaacgagtggggagtgaacaagcctcgcattttcacgatcacagggttaagcctgttttgcggcgtgaaccagtcaacgcttgggcgctatcgccacgacccgaactatgcgccagttatggagtttatcgactccgtaatctatgagcaaaaattccagcttgctgccgtcggcatgattaacgcttctttcgtcggtaaagagatggggatcgataagccgccagtgctgaacatcgacgctatcgccggggataagaacgagatcaccgaagagaaattagagaaagccgtgaccaatattcttgataagctgtaagggtaggctatgaacgaaatgatcatttgggaagacctgtcgccagccgataagctggcaattaaggcactgagtacgcgaaacttttcgctattcctgaaaatctggttccagatcattcagggcgaaaagctaatgtggaactggcatcactcctacttttgccacacggttgatgaaattatcgccgggaagcgcaagagcacgatcgttaacgttgcgccaggctccacaaagacggaggtgttttcaatccacctcgcgccgtatgcgtatctcaagtgccggaaggttcgaaaccttcagatctcgcagggtgacgccctgtcaaaaggcaactcggatcgcgtgattaagatcttctcatcaagcgagtggcaggagctatggccatcaaagttcgggcgcaagcagatcgatgaatttcaggtcatggacgataacgaccgcgtaaggcttgaaatggtctcccgttcgtccggcggccaaatcgtcggtaagcgtggcgggtacatgacgccgggattcagcggccttatcgcgctggatgatatcgacaaacccgatgacatgttctcgaaggtgaagcgtgagaaaaaccacgtactactgaaaaacaccattcgatcccgtcgagcgaagaagaagaagggcgacgaaacgccaatcctttccgtgcagcagcgattgcacgcgcaggatgccacctggttcatgatgagcggagggatggccatcgacttcgatcgcattgttattccggcgatggttacgcgggaatatggcgaatcgcttcctgactggttgcgtcctgagttcgaacgcgacgtgctttccggcccgtcggtggttattgacggcgtagaatactggtcattttgggaggacaacgaatcgatcgagaaccttgttgccttgcgcgaggccgatctttatacgttcctttcgcagtatcagcaggagccaatcgccctgggtggcaacgtgttcaagtcggagtggtggcgctattacggcgattccgacaaggcgcacgagccacgcccggacaagttcgaatatacgttcatcacggcggacaccgcgcagaaggtcaaggagctaaacgactactctgtaatgtgctattggggcaagtatcgggatcgcgtctacttcattgacggaattcgcggcaagtgggaagcgccagatctccgcgttcaggccgaagcattcatcaagcagtgctggcgtcggaacaaggagtgtgggaaccttcgccggatctacatcgaagacaaggcgagcggtacaggtctaatccaggatttaacaaaggcggtaaacggcatgggcgagatcgtcccggtgcagcgcgataaagataaggtcactcgcgctatggatgcacaaccaatcatcaagggggggcgtgtcgtgctgccggacaatcacccattcgttgcagagcttgaggcggagatgagcgcgtttacatatgacgattctcatccacacgatgatatttgcgacaacgtgtttgacgccgcaaacctggaaatgaacctgagcgacgatccggtagagcgaatgaaacgccttgcgggattgaaaaagctgggtcgctaatacataatgtgggcctgacggcccacacttaaacaaggttgaaatatgaataacattaagatggacgactataatcaaatctttaatggtggcgctggttatgcgtcaaccctcgcgtctatcgcggcaagatttggaacaatgtcgcaggttgaagagttctatcatgaaaacggcatggcgaagaaaatcgttgacgtgatcccggaagagatggtggctcccggcttccagctaaacggcatttcagataacaccaagtttcaatcagaatgggacgggttaaatctggagccgcaaatcaccgatgccctttgctgggcgcggctgtatggtggctcctacgtcctggcgatggttaacgatggtcgcgcattgacttcagcagcgaagcggggtaagccgctcgaatcgatcgttgtttacgaccacgattccgtttccgtcgcagaggaggaaaccagcccgcgaagcccacgattcggaaagcctaaaatgtacgaggtgaagccgctaaacggcgggcaaccgttcaaggtgcactatacccgtatgcactacatcgacggcgagcgagtaaccaacaaggtgcgcaagctaaataatggcgctggcggttcggtgctgaacaagtcaatcattgaagctattcttgactacgactattcggaatatctggcaacgcagctactgaagcgcaagcagcagggcgtttggaaggcgaaaggcctggcgctaatctgcgacgacaaagaaggcgagtacgccgcccgtttgcgcatggcgcaggttgacgctaattcaggcgtcggcaacacgatcggcattgatgctgacgacgaagaatacaccgtgattaactctgatatttcaggcatcccggaattcttgtccgctaaaatggatcggattgtcgccctgtcaggcattcacgagatcgtgctaaaaaacaaaaacactggtggcgtaagcgcaagccagaacacggcgctacagacgttctacaaactggttgaccgcaagcgcaatgacgattacaagccgctgttagaattcctgttacagttcatcgtaacggaggaggaatacagcgtcgagttcgaaccgttgtcgctgcctaccgatgcggagaaagcggatatcttccagaagaacgccaacgcggctcgcggcctcgttaccgaccaggttattgacgccaacgaagcgcgtgatactctgtcggcgttaattcctgaactgaagctaaaaggcaacgctccgaagcagaaaaaacttccggatcgcgccgctggttcaggcagcacgcaaagcgcagagatcttaaacaacacggaggcggatgatgaaagttaacggcagaatcccaaactggcgttatcctgaagcaagcgagcgggatttatcccgctccatgcaggacgcggtgacagaactcgtggtagaaatgcgggatcgcttagaccgcctgaaatttgacgccacggcggaggagatcagccaggcagaagacgatatcagcgaatcggccatcgtgttcttttccgccgtaattgcggcgctttcctccattgggttgactatctatagattcaattctaaacagtggcttgcaattgcgattgcggctggcgggcggaacaacgaatcagttatgcgccttaaagaattcggcgctggcgggtatgaagactggtatcaagattcgttgaggaagtgggaagataccgccgaagcgtcgatcaggaagttagcaagcgatatcgttgctgactggacgacgaaagttagaaccgccaacaacattggcaagtctcgccagcagatcgatgaaatcatcgaagggcgctacgcgatttatggtagctggtcgcgcaaccgggcaagcggaatcatcggaacttttaacagtatgttgatgatgcagcgcctaaaagatgctaaagtgtcgcattacttttggttcggcatgatggatgaccgcgagcgcgaaagccatatcaagctagaaggtaagcgacgccctgttaatggtgatggcattttccccggcgaggagtacggttgccgttgctgggcggttccgtcatttgataatgaggatgattgatggttaactttaatgattactttaatcacgtaggaaaggatctgatatggaagcgagcaacatcaaaccgagtaaaagttggtgatgttgccgggtggaaagatgagcatgggtatgtatacattagattcatgggcaaactgcgacaagctcaccggatcatttgggaaatgcaccacggcacaatacccgaaggaatggaaatcgatcatattaaccatgtaacggacgataacaggatcgagaatttaaggcttgtaaccagaaaggaaaactgtaaaaacgtatcaatgagcgtaacaaacaagagtggagttgtcggcgtgagttggtgcaagagaacaggtaaatggtttgcatccataagggttgataaaaaagagcgattcttaggtagatacgaagacaaaaacgaagccatttcagcaagagaggcggcagaggtaaaatacaatttccataaaaatcacggagataaaaaatgaaaagagttcaaaggttcgacacggtaaagatgaaggcccgatttgatgagaatggctttctggttgacactccgattgtggcgcgtatcggtgcgcaaacgtaccagacgccaaccgggccgcgagtcgagttccgcccgcgttctgaggtgtttgatgctgaatcgctggcttcataccagggaaagccgatcactttgggtcacaagatggttaacgcgcagaatgcgaaaggcctggttgttggctcgtgttccggcgctggcaaagaagaagggatcggggttctcgttccggtaatgatttacgacggcgaggcaatcgagcaagcgaagaagcgcgttgccgctgaattgtcggttggttacacttcggcagatatcgatcgtaagggttggggaaacaacgccactggcgaatatcacttcgatgatgaactaccggaaaacttcgaagagatgaaaaatgattccgtctctgattgggttcgctttgatgcggtgcaaacgaagattcgcgtgaatcacgtcgcgcttgttttccgtgggcgagcagggattgcgaaattaaatcttgatagcgaacaagaattcccctatgatgacgactcaaaccacaaaggagctaaaacaatgatcattaaaattgacggcgtagatgttgaagtggccgataacgtaggcgcttacattgccaaactagacgcgcaagttgcatcggcaaccagtcaggtaacgagcatcaccgcagagcgcgacgcacttcaaaccaaagttgatggcattgaagatgaagttgccgcccgcgttgctaaaatcaaagccgacgaagacgcaaaacagaaagttatcgcagttgtttctgccgctggcgtcaagtgtgacggcctggatgttaaggcaatgaaagttgcttacatcaaagaggtagacggtcgtgatctgtctgacaaagaagattcgtacatcgacgcttcttttgactttatcgccaactctgataagatggctggcaatcgctccaaagtcttcggcaaaaaagaagatggcgagcaaaaagacaaaggcggcttaccgaaacttgacggcaccgaaatcatcgatccgcaggcaaaattccgccgctaataatttgcggccttcgggccgctaccagaccaaataaacaggagattcaaaatggcacagattccagcttcttattcccgcaagcgtgatattgctgtagcggggcagatcgctgatacgtcactttacaatatcgacggaacttgtgttgctgaaggcgatatcaaagctggcgtactggtggcttccactggcgcagtttccaatggccacaaggtagttaaaccagcaaccgcagcgagcgacgtcattgtaggcatctcgcagttctcgcaagcctactcgcctgaaggcaagtatgacgatgagagcgcagttaacgttatgactcatggccgcatttgggcgatcgctgacgcaactgttactgaagaagattgcgcgttcggttctttcgtcacctttaccgcaaacggcacagtagcgaagggtgatgccggggttatcaaaactggctacaaacacactggcgaatacaccaaaaacgcagatggcactgttctggtgaaagtgcaggtgctttagggcgctgtagctccagcggctacaactggcgacgctggcgtataaaataaggggcttcggccccatttttgcaccagaaaaaaacctttgacggcttaacgattcgtgatattcttcatctcgttaagctaaatacacaaacaggagttttcagatgactatgaaattagatgcattcgaacagagtgccattaaggtcgcaatgcagggcatgggcattgatgccgcaaaactggatgcttacggtatctggactgttaagcagatgactcaattactgaatcgccagtatgagcaggcatacccgcagaccagcgcacttgagcttttcccggtaactaccgagatctcgccgaccgcccgccgctttgagtggctcgaattcgatggcgtaacttctgcgaaaattatcgccgattacaccgacgacctgccgaccgttgaagcgatggcgaaagagaagtcagggaaagttttccgcctgggtaacgcgtggtttatttccatcgacgaaattaaaactggcgcggcgctgggttccagcctgagcgatcgcaaggcaactctggcccgcgaaggtcatgagacgctcgttaatgatctggtgttcaaaggatccgctcctcacggcatcgttagcgttttcgaccatccgaacattaaccgcatgaccgccagcgcggcttggggcgatgacgcagcagcggctgaaaaggcattcgaagatctggaagacctgctaaacatgatcgaagaaactacgctgggccgccatcacgcgaccaacatcgtgattcctccgtctaagcgtcgtcttctgacgaaaaagatgcctgacactagcggcgactcttatctgacctggttcaccaagaaccacccgaacatcaccattacggcgatggcggagctggaagatattgacggcgcaggcaccaaaggcgtgctggcatacgaaaaagacccaatgaacatgagcatcgagatccctgagcggttcaacatgctgccgatgcagccgaaagacctgcatttcaaagttccgtgcacctccaaatgcactggtctcatcgtgtaccgcccgctgactattgcgattctcaccgggatttaatcaaaagcgccttcgggcgcttttttattgcattgcattctgcaatgtgctttaatttgaaacctaaagtaaaccaatggagcattaacaatggccagtaaaaaagaaaccgtagaaaccgtagaaaccgtcgaaaccgtagaaaccaccagtgccgaacaggcgtcgcaggttgttcaactacaaaacgttggtgcatgtgcaattcgctataaaggcaaaaattacgtctatgagcaggtttttgaagtgccggaaaacgaaatcgaccgattccgccacgaaatcttcaaaggccgggtcgaattctacgacaatccgaaacgcacgcgcgaatacatcgcagcggtgaaggcgaaagcgaaagagatcgtgcagcctaaaagcgcggaataacaaaaactaacaaagggcgcttcggcgtcctttttcatatcaggagagcgaccatgaattacacaattcaagatgtgatcgataaaatgcgcagccttgcacctccgcttaaagaagttccagatgaactgctgtctgcgtgggttgtgcttgccgaagagttcgtttgcaaatccaggttcggggattccatcgttacggcgatcgcattgatgaccatgcacctaatgtttttggatggagcgatgaagcaggaaggcgaaagcctggaatcttacacgcagcgagtggcatcgttcaccctgaccggggagttttcccaaaccttcgatcgcgtatcggcgtcaagcgacaacgaaatgctttctacgccgtggggcaaaatgtactggcgtatgctcaaaatgcgaggcggtggcttcggcctccttaccgccgggaacgtgcgccgctgcggaattggtaggtgatcgctatgaactacaaacaaatccaggcacgcgcaagcgcgggcattaagtttttcagtgacgctgacggcgtattcaacaagtacacgaaaggcgctggcggcggaatcgatccggaaaccggggaagatatcattcctggcgaggtggtaacgacaatcaagggcgcgatcagggatgtaaattaccgtgacattaacggcgaaaccatcctcgctggcgataagcgcgggtttttcactcatgatgtgccaatcatggagggtgacgaaatcgaagtagacggcgagcgctaccgcgtggttaatgcccgtccggtaaaaccaacgggaaccgttgttgcttaccgtccagttttgcgcagggtggcgacttatggctaattacacgatccgggagttcacaggggcaattgatgcatggtgtaaggccgctggtgatgcgctggaggacgttgtaaggtttacgtgtgaagatattcaccgcgacctcgtaatgcgttctccggtggatacagggcgcttccgtggtaactggcaaatcacctttaaccgcgccccgctttacgcgattaacgcatatgaccaaactggcgaaaagacaatccagaacggcaaagccaacattgcactatacgcaaaaggggctgggatcacttcgatctggttcagtaacatgctaatctatgcgaacgcgctggaatacggccattcaaagcaggctcccaatggtgttatgggagttgttgcgatccggttgggcgtttatgttactgaggcaatcaagcgagcgagggcgaaaaatgcattatgagatggcgttaaaatgcaaggcggcagtggctaaatttgccgccgagaacgggttaatggtcgcaggagataacgttgactttaagccaccaaaacacggtgaaacttatctcaagttctcctacgtagaagcggattccagatctgtcagcctttccagaacttgccgcgtttatctggctatggtgcagattgacgttgttttcaaacccgggatcggaaccgacgccgcgcggctaatcgcgcaaaacgttgcaaaatccttccccgaaggcaaggttgttgattctgaaagtaagttatatgtgagcgagtgggcggaagtgtaccgcgttcagaaacacgaaacaggctggctcctacccgttcgcttcacagtaagatgcgaaagcgcggaggagagcggttatccatcaacatgactggtcttagaggtgcttataatttcttgccagcctgtaaatatataggcataatggcgttgttaaactttcatcaaaacaggagtattcaacatgcatttaccaaacggtgcaaaggtcttctttgagaaggctcgcggtgcggccattccgtttaccgcaatgaccaacgacgcgaaaaacccaaaaatcacagtggcggacggcaagctgaaggtgaaagatattgtgatcttcaccgattgcacctggggcgacttcgttaacaaggtggctcgcgtaaaagcagtgacagcaggtgtggcaacgctggaagagttcgatacctccgacactaacaagtatccgggcggcgcggccactggtaacgtgagcgtgatcactgattgggtcgaattgccttgcattcaggatttaggcaaagacggcaacgaacagcagttctataactatcagtgccttggcgatgagcgcgagcaatcagaacctacttacaagtcggcggtgacgcttaactacacgtttgcgcacgattacagtaacgcgatctaccctgtgttgcgttcagccgacgccagcaagcaggcgagagcgatgtacatgtatatcccgcgagcttccgaggttcgttactggtctggaattgcatctttcgatgacattccttccacggctgttaacgagatggaaacggtaacgcttaacattgcgcttaaaggtgctcacgtcttccttccggttgtcgtgtaattaaatggcggggcttgtgcctcgcctttttttgtgcataatagcgaataacacaaaccaatcaggagttaacaaaatggctaaattcaaaattcaaattggcggcaacctcccttctttcaaactgcccgtaaccttcacttgcccggatggcaaagaagcgaccatcaccatgaccgtaaaacatcgctccaccgatgagatgaaagacttttatgagagcgaagataaagcgccaaagggtaacgccgagtttatccgctttatggccgaaggctgggatcttgatgatgagttcaacgacgaaaacatttcctggctttgcgctcacttcccggcgttcgtcatggcactgccacaaacttacatggccgcgcttgcgggccaccgtgcaaaagtttaaggcgggctgtttatctcacgcttcagcctgagctaaccgatcgccagcttgccgagtacgggttaaggcgatcggattatgaggcagatcttgaaacgatctactttgatgaacagaccgcccaaagctggcagctattccaggccatgcaaacgcagtggcgcattgggatgaacggcccaacggggcttgactataatacattgcctatgttcttcgaattgtataaaatcgacaatcgagaagcggcattacttgacttgcaaatccttgagggtgaatatctgaaggagatttacaagaaatcaaaataagcgcctacgggcgcttttttcatatgggggctaaacatggctgataaagtagctgggttgacgtttggcgttgacgtttcgcaggttgataaagcggtacgatcactagcagaactgaaaaaccaaagccagcaaacaggcgctggcctacagtcacttgcggacgctgaaaggcgggccacggcgcagaccgaggaaatgaaccgcgcgttgcagcgccagaagcaagagactgacaaatcaaaaaccagctttagcaggatcgcaagcgccatcgatccaacgatcgcaaaaatggccaacttgcgcaaagcgacggaagaacttgataaagcgtgggcgctgggtcttgttccggacaaggaatttttccgccttggcgctatcatcgagtctaccaccaaccaactccggcggcagcaggcggcgctaaccgaagaaggtcgcgcagcaatcgcagaggcggaggcaaagcagaaggcggcaaacgccgggcgtgattttgtcgccagtctgaaacagcaggctgactccatcgggaaaacacgcgccgaactgctggaaatgaaggcggcgcaattgggtgtatctgcggaagcggccccgttcattaatgccctgaagcagcaagagcaggcgttaaagaaacagcagaatgcgatgggcctggctggcatttctgccgggcaatataaaatggccatgcgccagttaccgatgcagatcacggatattgtaacttcccttgcgtcaggtatgccaatctggctggttgcggtgcagcagggcgggcaaatcaaggacagcttcggcggcttgagcaatacgtttaaggtattgttgagctacattaacccgctaacggttggtgctgcgtcgttgggtatcgccctggcggcaatcgctaaagctggttatgactcctggaaagcgcaacgagaactggcgaatgcgctggtgctgactggtggctatgctgcgaccaccaccgggcagatcacagccttaaccgaagagattaacaaaaactcatcggctacgattggcagcattcaggaaatcgcaacatcgctcgccagttctggtaagtacacaatcaaccagattaagcagatcacgaagactacggcggaatggtcggcgcagacgggtgagagcgagaagacgatcacagggtattttgattcgatcgcaaaagaccctgttaaggggcttgccgatctcaatgagcagtttaatttcctgaaagagggccagctaacctacatcgaatctttgcgtaaaaccaaaggcgagacggcagcagcagaggcggctacaaaactgtttgctgatactatggataagcgccttaaagatatcgcggacagcgcaacgccactcgaaacgatgtggacggatatcaaaaaatgggccgctgactcatggaaatgggtaggcgatcacacggtaggggcgctaaaccttatcgttgatacggtttccgcgatcattaacacgatcaggaagctgattgccgacggcgacgccatgatcgcgcagttcatcgttgacgctggccggaagctgcaaaaaattccaggaatgggcgactttggcaatgaatttctggcgcagcaggagcagctaatcaaggactcgaaagcgaaatccgacacgcttgcaaaaaccattgcggaacagcaggcaaggatcgcaaaaggcgaaatgggttacattgatgccgcgaaggataaaaccctttccggtgggtacagcagcaaaacgaaggatcgcgtaaatcaggaagaaaaagatatcctgaaaaaccgcaacgccaggaagcagcaggtagacgcgggcgttaaaattgatgagcagtatcaggctgaactgctatcgctacaggcgcagctaaaggttttgcagcagcacaaagggcttgacgacaagatcagccagcagcgcaaagactacttcgagacggttgctaaattccaggttttggaagaggcaagccagaagcgaaaactgacccaaagcgaacagcagatgctggcgaacaaaaagaatatcctgtacatggcggaacaaaaggccattgtgggagatcagattgttcagcagcagcgactgaacgccttgcttgacaagtctaccaagtatcaaaaccagatggcggagaagaccaaggcgctacaggataccgccggaatgggtagcaaggagcaggagagataccgggccaatgcgcagatggcggctgactggaaaaacaacggcggatctttaagtgaccctggatttaaagcgatgcaggccgcaagcgataaattctacgcacagcaagatgcgcaaatgatgaactggaaggccgggtttactaacgcgtgggctgacattggcgaagaagttaatgacgtatacaccaatatcggggatatcactaaaaacgcatttaacggcatggcgagcgtgctgactgattttgtcatgactggtaaggccagctttagcgacttcgcaaagagcgtgatcactgacattaccaacatgcttatcaagatggcgctgtttaactcgctttctgccgcgtttggtggtggtggaacgttcagcttcgccagcatgttcagcaaaggcttttctggcggcggttacactggcgacggcgggaagtatgagccaaaaggcgttgttcacggcggggaattcgtattcaccaaagaggcgacgcaaaggttaggcccggaaaacctgtaccgactaatgcgcggctatgcaagtggcggcctggttggtggtaacgcaagttccggatctggaatcaccaacggcggcaacgtcgcggcgtcggcggctatggtgtttaccattggtgatattaacatcacgatgggttccggtcaggatagcaaggggctagagcagggcgtaaggcagatcgtgaacgatatgttcaccgaggctttgagccaaaacgggcgcattgcgaagttcgtcaatgagaaaacgaggaggtagtagtggattcctttaaatggtgtacacaaatccaaggaggggcggcgaaagtcgccgtatccaataacgttcgggcgatcagcttcggaaatggctacatccaaactgcgtcgagcggcattaacacaaagcgccggactgttccgatcgtttatggcggttcggattgggaagcggtttataacttctgtcaggatcacgtaacaaagccttttgtgtggaaggcaccggatggaagaatgggcgtgttcgtcgtaactgccgactccgttaaccttgcgccgcagggtggcggggtgtttgaggtaacggctgaattcgccgaacgcttcacttcagccggataatcaaaaagcgccctttacgggtgcttttttttggcctatgatctggagtcaattagaggagggcttacgatgacagccaatgtttcaaaagattttgcgaactgcctacaaaaacttttccccggcgagatcctaacgctgatcgatatcgacgccacaaagttcggcgggcaggtctaccgattccataacgagaacgtcgcctatacaaccgaggagcttttggccgcggttaacggcgggacgcttcagccaaagatgatcacgtttcgcggcgagcagtacggcccgcgaccgttcggcctgggcgggatcgcaatgtcgagcgatggcacagtggaaaagccaacgctgacggttagcaatattgatgcgcaagcgagtgctcttattcgagcctataacggccttatgcaagccaaagttacggtatgggttttggtcaaggaattgctacaaaacgacggcagcgttaaagagggcgattttaggcgatttatttactacatcgagcgcccaaaacaggtcgacccgcaaaaggcaacgttcgaattaacatccgtgtttgatatggatggattaatgatcccggcccgtctgacgcaaaccgtttgctattgggcgcagcgtgggtggtacaagtctggcaaaggctgcgactacaacgggcagaacggatacttcgacaagttgggaaacagggttgaagacccgtcgcaagatgtttgtggcggcttggtttcttcttgcaggcttcgttttggcaatgaaccgttgagttttggcggttgtgcgacagcaacattgaaaagtggaaggtaatatgttaactccgaaaatcaaaatgcagatcatgcagcacgcgaaagaagtttacccgcatgagtgcgcaggtctggtgacgcaaaaatcacgagtgcaaaaatatcaccgactcgacaacgtttcgccagatcctgagaaagaatcaatgcctgatgaaacgcagtatgcgctggcatcaatggagggcgagccgatcgccttcgttcactcccacactggcgatggggcaaccacaattccgagcgccactgatttatgcttttgcgatgagtctggcttgtcgtgggttatcgtctccatcccggaaggtgatatgcgaatcattgagccgaaacgccgacctctgattggtcgcccctgggctttgggcgcttacgattgctatggcctaatcatggattttcacaagcgccacggcgtcacactaaaagatcggcgattgccgttcgaatggtggaagccggaatacaaagagaatctttaccaggattactggcaagaggacggattcattgaaaacactggcgagcctgaagttggcgatatgatcatcttccagattcaggcggaaaagtggaatcacgctggtatttacgttggaaacaataacatccttcatcacgcgtttggcaagctgtctcgcagggatatctattctggatggtacgagcagcacaaggttttaatttgcaggcacaaggagcttaaacatggcatcacatacaaagacgattaaactatccggttccctggggcgtcggttcggtgtcttccacaaacttgcggttgattcagtcgctgaatgcatccgggcgctgtcttaccaggttgaggggtttaagcctttcatgcagagcaaggttggtttaaatatgcgcttcggcgttgtcgccgacggaaaaccaatcagcgcgaacgaccttgcgacttttgccgtggcgagggagatcagaatcattccgatcccaaaagccagaaagaacggcgggttgttgcaggtcgttatcggagcggcgattatggttgcggccttctttactggcggcggctcgctggcggctatgggcgctttttcatcggctgcattcatggctggcggctcaatggttttgggtggcgtaatgcagatgatcgcaccgcagatgggcggcaatatgcgggcgagcgaatcgcctgagaataagccatcgtatgcgttcggcgggccgattaacaccacggcggcaggttatccaatccagttgccatacggttacagattggctggcggcgcattgttcggttctggatcttacgcagaagacaacaactaattaagccattcgctttttagcctgggggcgtagcctccgggctttttgtcgtgtacaattgcgagactattaacaggaggctaaacgatgactaatatcaaggcccgtaagggaggctcaagcaagccgcgtaccccggtagaaatgccagataacctgatctcaaaagacaagatcaagttattgctggctgtttctgatggcgaggtcgttaacgacttcagtttgaagcagttgcatttcggcggcgtcccggttcaaaacgaagatggaagttacaactatgaaggcgtgattgctgagtttcgccccggcacgcaaacacaggactacatccagggcttcagcgaatcaagtgctgagttccaggttgctcgtgaagtcactcacaacacgccttatacgcttaccgtatcgaacaaaaatctgtctgctattcgctttcgcctgttatggccgcgcgtgctgactcaaaaagataacggcgatatggtcggatcggttgttgagtacaagatcgagatggcggtagatggcgcaagttatcagacctacctaactggcaaaattgacggaaagaacacgactggcggttacgatcggagcattcgcgttaacctgccgcaaaacttcacgtcgcaggttcttatccgcgtgagccgagtaacgccggatgctgacggggtgaaggttgtcgatgccttccaggttcaatcctacgctgaggtcattgatgcaaaattccgctacccgttaacggccatgctttacgttgagttcgatagcgacctgttccagaaccagatcccaaccatctcactcaaaaagaaatggaaaattattcaggttccgagtaattacgatccgattaatcgcacatactccgggacgtgggacggtgtttttaagtgggcgtggagcaataacccggcatgggtgctttatgacctgatcatgaatcagcgctatggtttagaccagcgtgagttaggaatcccggttgataagtggtcgctgtatgaggtggcgcaatactgtgatgaacttgttcctgataatcgcggcgggatggaaccgcgctatttgatggatgtaattgttcaatcgcaggttgaggcgttccagttggtaagggatatttgttccgcgttccgtggaatgacgttctacaacggggaaagcctttcgattatcgtcgataagccgcgcgatccggtgtacctgtttacggctgataacgtcgttgatggcgttttcgttcggacgttcccaagcgaaaagacgatgtacacgtcgtgcaacgtcatgttcgacgacgaagaaaaccagtacgaacaggatgttgaaccagtattcaaccctgacgcagccatgcggttcggccacaacccgaccagcattacagcgatcggatgtaccagaaggacagaggcgaaccgccgtggtcgctggattctgcaaacgaacctaagcgccacaaccgtttcgttttctactggcctggaaggtatgattccttcttgcggcgatgtgatttacgttgcagatccgcattggcaatcggcctttaacctggtgctatcaggccgcgttatggaagtgtctggcgtgcaggtgttccttgcctaccgctgcgacgcgaaggctggcgacactctgatcctgaatacagacgacggcaagccagtgcgccgcacaatcgccagcgtttcggcggacggtaagaccatcacgctaaatgttgggtataactttgacgttgcgcctgacagcgtattcctgatcgagagcgatcagcttgcagcggaacagtatgtagtaacccggattgaaaagggtagtgatgacgacgaatttactttcgccatcacggctacgcagtacgatccgaacaagtatgacgcgatcgataacggggtaattaccgatggccgaccaacttcggttgtcgaccctgattcaatgggcgcaccgaaagacttaacgattagctctttctcccgcattgttcaggggatgagcgtcgagacgatggttatcggatggtctgccgtgcagtatgcaaaactgtacgaggtgcaatggcgcaaggacggtggtaactggaacaacgttccgcgcactgcgacaacgcaggttgatatcgaaggcatctatgctggcgagtatcaggcccgcgtgaggtgcattagcggtgggaatgtagcgtctccgtggtctgaattggcaaccgccacactgaccgggaaagtcggagcgccaaaaggcccgattaacctgtttgcgtcggacaatgagatcttcggcattcgagttaagtgggctatgccggaaggagcggaagacacggcatacattgagctttaccagtcgcaaagcggaaccgatcaggacgcaagcctgcttactctgattccttacccggcggctgaatactggcactcaattttgcccgctggctacgtgaacttctacaaagccagaagcgtagaccggatcggcaatgtttcagaatggactgattacgctcgcggcatgtcgtcgactgacgttaacatcatcacagatgcgatcctggatgaaatcctggatagcgacgcgatgaaggaactacaggaaaacgcacaggatagcgcggcaaaactcaatgactacgcgaacagcatcattcaaaatgcgctggcgaatgatgcggacgttaggaaaatgacgaaggagaacggtaagcgtaaggcagagatcgcgcataccacggtgctgattgccaacgaatcagaagcgagggcggctgaaattacgcaacttaaagcgcagattgatgaagatatcacgtcgcagattacgatccttaacgaagccctggcgacggaaagcgagacgagagcaacgcagattggtcagttgcaggcagattttgcggctgatattgacggcgtaaaaacaacaatgaacgctggttttacgcaggttaatcaggctattgcaaatgaaagtgacgcgcgtgcaagttccgaggcggcactagatgccaaaatcgggcagaactccgcagcgctaaaccagaaactcgactcgtgggcgaacgttaatggcgtcggttccatgtacacgatgaagttgggcttgaggtacaacggtcaggagtatagctccgggatggccctacagcttacctcaagtggtggaagcgttgtttcgcaggtgctgttcattgctgatagatttgctatcatccgtaatgcggcgtctggcgcgtacacgctaccgtttgttgtgcagaatgaccaagtgttcatgaataacgcgcttattcaggacggttcgattaccaacgcgaagatcggtaacgtcattcagtccaacaactttcaggagaatgttgcaggatggaggcttgataaaaacggcgtatttgtcaactatggctcaacttctggcgaaggttccatcaagcaaacgaaccagaacatcactgttcgagatggtagcgggcgcgttcgttgccagttgggtaggatcactggatcatggtaaaattaatgccgggagaaatcccggcttaaccaaaggaggcagacaatggcttatggttttcaatcatgggatgcgaacgggaaccccaacaactatgggatcgtccctgtttcagttgctggatatattgcattagcgcaaggccagaaaagcggaacgtggtattacaacgtcccgcctgggttgaggcttggtttcttttgggtcgcaaatcaagaccagtacggcacatcgaagaggcgaattaccgttagtggtaatcagatcgttgtttcagatgcgccagatgatgcgctggaatcaggcgtctacccggcgacgcaaggttttattgtcgttcaaattatgagttgatgattatggcagattacggaattttacttaccaatgatagcggcaatgtttgggtttcgcctcaaagcatcccactggcactactatcaaagcagagcatcactcttaggggtggtactaactccgatgaagtaagatcggtaacttacgacacgaatcacccatgcgttccgttcgtggtctttcatggatcttcgccacaaggtgcattcacaaaaatcaagtacagcggaaacacttgcagcgttgttttttcttttggtaagcaaaacgtatatgcggaggtttattttttctccgtgttcccacagccaaatcctggttatgggcttgcaatttgggatgaaaacggcacgctgattttgaccaatgaaaccagaacactttcagacgtacagacctacggcactggttttaatctaaacgtcactaacggcgggaagtgggcggttagtcctgttcagttaggcgcgatcgttggtgttgttcgcgatccctacccaagaccatttcagggcgactattgcgcagcggcattctttaacggctcaagcacgcaacttaccgcatatctaacgcaggcaccaggaggagccgccagcgatctaacctacgtcaatatgaaaaacacctgcatcgctattgattgcgcaagatacgactaaaagaaaggggccatacggcccctttttctaccccttgagatttttgatctcctcttttaattcatcaacttgagcagacagagctttgattgcgcaaattgcatccatcaaaagagcattattgtcaagcacaagtttcttattttcaactacgttaccctcatcatcctgataggatgcgctgctttctttaacgtagcacgaatcgatatctcgcacctgctgtgcaataactcccctacgctcgcgtttcttaacatcatccttataggtgaacttgaccagattcattgctttgatgttttcgagtgactgcaaaccatcataagcaacaacattgtctttgtagttaatgtcagatagaccagcaaaaacaacgttgccataagcagtgcttgcaatattaccatctgatttaaactgccaatactgcgtattaccgccagttccccatttgctgacctcaataacggcacgatgttcataacccctatgttcctcaagccacatagcgcaacgcgcaccgttaccattaatgttgaaccgtgagataaatgatggagatttaaggatatcaccattattcccatttggatcgctagttggccacgctacaaaagcatcattaacggtactcctcacagtcccatatgacacaacacttccgcgaagatcggcagccccgccaactcgcaacgtgctcgacattgtaacagcgccgcgaagatcggcagccccgtcagcacgcaacgtgcttgacattgtaacagcattgctaaagtttgcattcaacccggtaacagcaaagttcgatgcatcaaaaacaacctgcttcgcgctgttcatatctccattagggcggaagtacattccttgaccattttcagggattgagtacacgatcgcattgctgttatttgccctaatagtgcaaccgttcagggtcagcgtggcgtttcctccaggaacgctaattgcctgcggctggctgaacgtgttagctacgttggtgcgcgggatcgtattatcattagccatcaaatagtcagacggtgaattatatacaattccagaaggctccgtgtcaatccaggtataaccagtgcgatcaatgattggccccgtaatcgaccctttgttagcctgtacgtttacatgattcaaccacagttcaggaacccatccgccgggagcatgaatataaacatcaaacgaggagtctgtgtttttcaccaccccaagattaatgcgtctggtgtcgtttggtctggcagcaatcagggtgcgctgagtaaaccaagtgtcaatattattactggttagcgtatcgggaagaccgcggccagaaatcgaaaagatatcaaccgggagatttgcagtgccataaccagtacctccgccaatgatgaactgagcaaatgcgtagccatcaccagcgttcttgacgttggcgatcttcatccacttctccccagcgaaagtgccagtaattttatccggcacctggacgccagccacaaggtcgacaacctgatcacgaagattttgcgtctgccccttcgcagtttgcgcgtcgttcttcgccgagttggccgcagtttctgacgcttttgcattggtctccgaggttttggctgcggtttctgatgcctttgcattggtctccgagtttttggccgcagtttctgacgctttggcgttggtctctgaggtcttcgctgcggtttctgatgcctttgcgttagtctccgacgtcttcgcagcattcttggatgcagcagcattggtctctgaagtctttgcagcggtttctgatgcctttgcattggtctccgaggttttggccttattctccgaagatttagcgttcgtctctgaggtcttcgctgcggtttctgacgctttggcgttggtctctgaagtttttgcagcgctttcagacgcagccgcagccgtagcgcttgcgcccgcagcttcggaatctgccctcacctgatcggcaagactttgcagagcttcgaaatcgaagttcttaaagaagtcgacagcatccgcaatttgagtttcctgtgactggtagtagcgcagagtttccgcaacatcttgcgccagtccgtcaacggtcagcgagtcacttaacaggatcgcgtaatcgctagacgctacgacagcgccttttgtggtgatggctttaatttcagtatcgctaaccaccttgtttacgacggccatttgaattggtgacgacaaaaacataatcgtcgcaccagggcgaatcagcgaaagcgatgattgccattttgtgccagtcccggtaacggttccgtctgcggccatagccgctttgccttctctgtatagtgccatgtttttaagcctcattggttgattgagtaacgcagataatagcatcaatgaaccgataaaaaaaggagcctttcggctcctttagttgtcaaattagaacgggatatcatcatcgaaatccatccccgcattcccgccgctgttttgcggcttaggcgcttgttgcggcttgggttgttgaggctggccccacccggattgctgattgccgccgccgctttgcgaaggatcgcgctggctgaattcgagttgcggcataatcatttcgttgtggctgtaaattgtgccgttgtgctcgcggttaacgatctgaagcgtccggcaggttacgctgatcaccttatccatttgcagcgcttcgtcgtaccacttaatcatgttttcttttgcaaagaaaactgcgcggtagttcgtgtaaattgtttcgtcctcgccatcacgattgcggatcttcatccgctccgacaggtctacggcgtacattttccacggcccgttattgttgctgccctctttgacataaggcgcttttcggattacccctgttacaacatgcattgtcattcctatggggcggcttcccgcccgttaaattagttgaaagatgaaatatcttgcgcttctggttcaggttttgattctaccttttccggctcgcgcttcgcaacctcttgcggtttaccggggttaaatccgtttgccggggtgactttcagttctgcctggcgtttggtgatatcgtcttccgtcattttccactccgccggggttaacgtttgtttcgccagcttatagatctcacgaagcgattcgagatcttcgcacgcgtcaatgcgttttttgaagtctttcggtgtcattttcgtaatttctgcatcatcatccgcctgcttgatacctagcgctgcggccagcgcataacggcgggcgtaagatgttgttgagccgtatgcttgttcgacggttttactgatcggcatattgtactgaaacgccatgaactcgccgctttcatgcaaaaacatagtttcgaggtgcatcaccttttcggtgctcgtatccatcatggattgaatgaccataattttgttcttctccagcgccggggaaatagcgtcgaggatatccccaagattcgcataggtgttcccaagatggttgttcttaccgcttttctttgcggccacgaagccagattttgccttgattaatgcggctgcgatggtggtaaatttttcagatgtacgcatgataaagtttccttttcctaattggtaatgcgcactatatcacaagtgcgcaccagtgtttagctatttgtgccgtatacgtccgggaacatgtatttcacaaactgaggagtcggcaaaacaacttccgccgcgtttgactcatatgatggccatgaatcgtgcttcacgcattcagcatactgatgaatcacgctttgatactgtttgcgaccgatctcgatctgctggctggtcagggtgaacgccagcggagcaaacggtgattttttctcctgcgttagcagtctgacaactaccgggcgtttttcgttgtaagtcttcacgaacagatcgcgctgcaatgccatcttgagatagtagcccaagttgaaggcgagtcgcccgaaatcgtcaggcttggaagattgcgtggttttgtagtcggtaatcaccacgacctcgaaaacctcatccgggttgaacccccactccttgatgagttcgggatcggaaacaacgtcaacatgatcgagtcgaaccttaaccttgacgccgaagatctcaccgaagattgacaattcacgctgtgctgtaggcgattcgatacatgcggcgtgtcgcgggttagccagcatcacgctgcgcatttgaacaacggcatcgaaatcaacatccttaaccagcttgcgcccggagtttatcgcggcgctttcgtcgcacagttcaatagcccaccaaacatttacgtcaatcccggcgcgatatgccatttccagaagttccgggtaatccttgttggacgtcccaatcaggccacacgctttcagcttcgcagacagtgccgacttcgacgtaatcagatctttaacctcgcccggagaagtcgcccgcaggtactcgccattaaactttgccgtctcaagcatacaggtatgcgaacaggttccgaacgccagcgcggctgcttcctcacgcactttgaatttccagtgcgccggggatgttgcgtaaatctcgccgaggcttgagccgctaacgtattccgcgcaccaggagttaggatcgtggtaatcatcgttggataattccgcgttggtgtatgccttaaaaattgcttcagccattggtatcactccatttgtggtttcgttgcgttaagtatacgcatgacgattccaggcgcaagtcaaaaagtgctatccgcagttggttaaaaaacgagcgaaatttacgtaagatttagtaagatgcatcttacgtgatttttcctatatatttcatttagttaatgcaaatcggtaagatggtaatatccctataggtaaatatccatgaaaaatatggcgcgaaatccagcgaaaaaagacacgcaccccggagaaatcttaccaagattgatagatacagatagagtaataataataatattgttatttatcatatacttactatctatatattgcggttaattggttaaattttgcgcgaaatttacgtaagattcatcttactaaatcttacctaaagtggttcgaccagctgcaagccactgaatttcaggcataaaaaaaggtaagactgatttgctcaatcttacctaaattctggtcaacatttaatcatagaagcgacgatgccctgtacaacttgcgttcaaatccgagcttaaagttgtcaccgttcggaacgataactttaagatcccgatcgtcagcagccgccagcatatcccgatctccacgacggcaaactacccgcatttctcgcttaccttctccgccattgcctttatacctgtacgccacgatctcgacgtttgaaggtatgatgcaggcccaaacgtcgcacttgaacgaactggcaatattaaagtgcatcgcctcaatccaggatcgagcaaggtaaatcggcccgttaccgtcgtcgctctgattggtcactatcaccgatccgaatgtcagatcgccagccaacatcttctcccgaccctcctcatcaatgaacagcatgttgcaatactcatcatccggcccatcctcatgcactagttgcattggtagcgcgtgaattagctcctgtctgcagttctcgtgagtttttacgccaaccagatatgatttgatatgctcattttcaatgccctcatagagcgttacaggcgtgctatcgacggcctccgttctgtttaaaactgccatcactctttcatgatctgccatctttccgtagtcatacccgttatcacgagctacctgcttgtttctcttgactacgtattcttgcggaacctttccgagatagcgcccaagaatgttgatgcactcgctatacggctggccgcttaacttcattaaccagccgatccccttatcggcaccgcaaccgccacagtatgcgccgccatcacctcgcgtttccagcttgtcagtccagcggaatcggtctttgccgccgcagttcgggcagtcctggtgcttgccgttgaagtatcgagagtggatgccgcaaatgttctgcaacgcctcgcgccacatgccagccatgtacggcaaaacctctttttcatcgtaaaaatccacgtcgtaacccccaaataaaaaacgcctacacgagaatgataacccggcaggcgtttagtgtttagtcaaattgtgctatcggactacgcggagcatttcgcggcggtcgcatcggcgcgtcactggcttgccgttgctgtcaaatcttaaatcaggtcggcagaatgaggcgcgaaaacctttgcaattgttccgtcggtagctcttatgtactagataagcgccatcggctgagatcataccgcgcttacgccactgctgaacaacctggatactaactcccaactcttttgccgttccagcgataccaccgaaggcatcaataaccagctccatccgcgcagtcaacccagctcgaacctcatccttcagcacgtagtaaccagtcggtcgcttgcgtttcttcttatctttcccgcgcgacgttccgttgttgccgttcaaggttcgcttatcaaccattgccatttgctccataattcaaccctcatagcattttttgttaaacctgataaaatgttccatgtattatacacgcaactatgcgaatgacaaattaggattgacaatggcaagcacagaagaagacgtagcatattttaagcgactatttcgttatgaaggcggaacactgattcgcaaagttacaaccagtagtcgtgcattcgctggagactccgtagggtgcgagaacaacgttgggtatttacaggtaagcgtaaaaagcaaacccctatacgttcaccgaatcatttgggaaatgcataatgggcctatcccagaaggaatggagatagatcacatcaaccaggtcagaacagataacagaatcgaaaacctgcgactggtaagccaccaagtaaaccttaaaaaccaatcgatgaacagtggcaatactagcgggcacgctggcgtaagctggtttaagcgaggcggtaagtggagggcaacaataaaggttggcggaaggcaaatacacattggttacttcgcgtcgtttgagtcggcagttgccgcacgaaaagcagcagaaaaacaatatggttttcatgataaccacggagcagagaaaaagaaatgagcttatcgattgagcaacaaatagatctatacgcagacaaaatcccggcaatccaaaagagatttaccgttggaaatatcgttccgtatccatatcaggctgtggcttatattgagacagccaaaagaatagcaaactacaccgcaccgttttacattaaggcttcggtttccgccgggaaaaccatcatgatcgccatgctcgcagcgcagtgcaaggcaatgaacttacccatgatggttcttgctcgccaggccgagatcgtgaagcaggattccgaggagatcagtaacctcgacgttccaaactccgtttattgtgccgggttaggcacgaaggcggcatacttcccgatcgtcgtcggatctgaagggacggtggttaatggcctgtttaaaatgctgggcgactacgtgccttcagttctggctattgacgaatgccaccaggttgactggcaagatctggcggaagcgatcgccaacaatgaatcgttcgagtacatgagccgaccgaaggataagccgtatcgcgtgaacggggaactggtcgatgccgaccacccatacgacgaaaaattcgacgacgtagaattcggcggcggtcgcacgcagtacactatcgtcatttgtgagttaatgcggaggtgccttgagaagacagggcgagaacttcgcatcgttggctatactggttcggagtttcgcggcgtcattccgattttacaggaagacaagagccagcctggtttttggcgcgagcagatcaccgacattaacacaaactatcttgtcgagttcggatcggtggttccgacaatttttggtgatactgaatccgaagggttagggtatgacctatcagaattccacggttccagtcaggacggtacgcaggattttagcgcggaagaattgcgcaagatggaaaagaaaatccatgaatccggcgaaatgacgaagctgattatgcaaaaggtcgtggagcgtgcgaaaacccgaaacggagttctgataacttgcgctggacagcggcattgcaaggaggcggcgagctatctaccgccggacgcaacatacgcgatcatcaccgaaaagacgaactcaaagaaacgcggcgaaattttggataaggcgaatcgcggtgagatcaaatacatcttccaggtgatggccctaaccactggcgttaacgttccattttgggatttttctgtgatattgcgcaagatcgggtcgcttacgttgcttattcagcttttggggcgcggaatgcgacttctgaaggactggcaaaaacagccgccttactcgtgggtgaaagaagatcaccttgtctgggattttgccggaacaatggatgacctgggccagttgtatttcgatccgatcttggagcaggcgcaataccaaagacgcaagagcagcaagaacggcccgaaaatttgcccggtatgcaagggggaaaatagcgagtacgcccgcagatgcattcacaaagacagtaacggcaatcggtgcgaatacttctggatctcgcagaggtgcgaagaccagaaagacccgcgaacagggaagattaaaatcaaggggtgttacgctgaaaatgatattgttgcccgccaatgcagatgctgcggcgttcagcttaaagaccccaatgacaatctcaccgggaagcactatacgcagaatgactggtatgatgttgtctggttcgatatcggcttgactcgcaatcagtccgggatcatcttcaattacgtgttactgaaccatgacggcgagcgattcaccgcaagggaaaagttcttcccggaatcagagaatcagatttgcggcaagctgtggcggcaaaaggcagtcttccagcacgttagcgacgcggtaatgcgtggcaagttgggcggaatgaaaaacgcccgcaagatcctggagtatgcggaatacttccgcgcgccgaagcgcgtaacgcatcgcatcaacggcaagaaggaggacattatttcccgcaaagactttggaggcgaggagtgattacagacaaaggggattacctcgaatattacggcgggcctgtaaaggcttgcccacttgaaaaaatcgaccagatgaacagcgtttcgtggctgcgttacgaataccccgattatctgttctggcatacggttaacgagggtagcaagcacaaggcgagcgccgttgcagatcatcaaatgggattgcttaaaggcgtaagcgatatccttgtgctgattgggctgggcggaaaatacccgttcgccgccattgagctaaagcgccagggtaaatcccaggcatcgccagtgagcaaggagcaacgggaattcctcgccgccgtccgaagccgtggcgggttcgctgccgtggcctatggattcgagcagtttaagatcgcgtttgaagacgcaatcaaatagcactttttgttaaaactacccggcgcgagtcgggtattattctcccatcgaaacgaagaacggagtatttaaaatgaaaaagattattgctttaattgttctatctcttgttctcattggttgtagcgaaaaaccaaaaacatatatttgcggtaatgaatcgtttgaagttactagcgactatattaaggtggttcgcggtaatagcgctggcgttttaattgatggcattggtgaaaaccagtataagctggttacaccacttggaacggctttttatactgttaataaaaacaccattgatattaaagttagcgtttatcagaacactttaacttgcgaggttaagtaataatggcaaaagatatcacagacaaagacactcacgacgcgttcacgactttcgaacagcttgagcgtgaaacgttcataggcaacgcgcttgccactggcggacactatcaggccgtcaagcctgataaattctaccaggtaacgggcaaccgctacgccgggagcaagacgccggatatcgtccgcgacaagtggtcaaccgatcgcagccttattgcttacatggaggagcgttacgggccatacgacctggacgccgccgccgaagaaagcaacaccgtctgccctaagttttacgacgaaaagaccgattgcctcaagcgctggtgggggaaaaataagcacgtatggcttaatccgccttactcgttcccggatccctttgtgctgaaagccattgagcagatggagcatgacaaccagatcgatattttgcttcccggcgacaactctactgcgtggttccgcgacgcacagaaggcagcggctgagatcatttggattgtcgcagacgtcacggaggacgaagacggaacgcaactaagccgatccggtcgcctagccttcatcaacggcctaagcgggaaaccagtcgacaacaacaacaagggtagcgtgattttcatcatgcgcaaactcaagccgggcgaggagcaaaaaacgttctacgtcccggtaagcgaaatctgcccttcattaactaaaaagcgcatgcgcaaacgtgggatctgaaaaatggaacagcttgaatctttcaccgaatacctccacatcgtcgtcactctgctggacaagtacggcttcatcggtacggatgaagaaaagatggccttcgccgatagcatcgatggcacttatcaagaattcatggataacggcacgccgcttgctgactggcccgcgattcttgagcgcgaattgctggattttcgggcgcgtgaaggtgcggaatatttcgcgaaacagcactaattgttaaacaatgcccgccgcgagcgggtattattgttccatcaaccaatcaggagctaacgccatgaacaccaaaaccattgccgacaccatcaagatcgcacaagttaagccgcgcatcgtatctcgccacctgattaacctttctcgcctgtgcatggccgactacgtggcgaagcctttagagaatggccttgatggtgaaatcggtgcgatctacttccgcgccgcgcacggcatcgaagaaattcacatgtacgagcagatggcggaatgcttctgcatttacggtgacgaatgatgattgtagaatctggccgcgctgccgtatggcagcatgccaaagaggctggcattagtgacgatatcgtgatgatcgcaaagtatttcgatatcaaggatatctccattgtgttcaatgggaaatttacctatcttcatgagcgaccactgaagcgaacgcgtatagcggttgcgacgcgggcagaggccgacgcgctgaagatgttcattcacgaatctaagcagaccaaaaaatattacaagtagcgggagtgttgagaatgcgatatattgcgatcctgattacggcggtggttctcactatcgcaatcttcaactacgcaattcaattgggataaattatgcaacctaaaatcacagacgaagaatttttagccgcccgcgaggagggcaagacctaccgcgagatcgccgaagagttcggcatgaacgttcgcagtgttgagcgtcgcggcgttcgacttgcccgccaggggcatttgcacggtaacaatcacgtagcgaagcacatcccggacgggttcggggtcaaaggcacatcgaccatgattcgcgcgaacggtgatgaagttgtgcgctgggtcaagtcagaagtagaccgcgaccgcatgatcgctttgatggaggcggcgcaagcatcattctgcgaagacctacctcgcgctgaaccgcagcctaaggatgaatctaagttttttattgaggatcagctcgccctgtatccgatcttcgatttgcacatcggcgcgatggcccacaagcacgaatgcggcgagaactacgacaccagcacggcggaaagggttcttaaccgcttctttgactactccgtttcggttgccccgcagtcgaaaaagtcggtcttgctggtcggcggtgacttccttcacagtgacggcctggacgcagtaaccccggcaagtggtcacgttctcgatcaggatagccgttacgcgaaacttgtttatgtggctattcgctccttgcgccgagctgtgtcgctactgctgagtaatcacgaagaagtagaggtgcaggtaatcgaggggaaccacgatcaggctggcatgatctggttgcgtgcagcgctcgcagcgttctatgaaaatgagccgcgcgtattcgttgacgtcagccctgcaattatgcatcgtaccgtgtggggcaaaactatgctgggctacactcacggccacacgatgaagaaggcagaaacgcgcctcgccgcaatggctacagacttccgcaaggaatttggtcaatgcgactacatctacacgcattcgggccattggcatcaccagaccgtaacggagcactcgttagggattgacgaagtacacggccagttaggggccaaagacgcttacgccgctcgcggtggttggcgctcatatcgccaggcggcggttattctgtacagcaaagaatatggcgaagtaggccgctttatctaccgcccgaacatgtaaccacaacggccccgcgaggggccaacaaggaaaaccaatgaatagaaatatctgcattttcgatctcgatggcacgttgtccaatggcaaccaccgtttgcacctgctgccgaaaaaagatctccacctaaccgaaagctggacggcgttcaacatggcggctggcggcgacgctcccattacggacacgatccgggtaatggaggccatgcgcgcagcaggatttatcgtcatcatcctgaccgggcgaagtgatgaggcacgcgagatcactgaaaaatggctggtgcaaaatggcgcatcgcattacgacctgctgattatgcgctccgcctccgacaaccggaaagatacggttatcaaagaggaaattttacgcaagattggcattgagcgaatcgttgcagcgtgggatgatagccccactgttattgcgcacttccgtagcctgggtatcacaacttaccaggtctgcgactacggcgaaaaccttcacgaccatctgaaatctcatggagtagacaaatgaaaaatgtaatcatcctcaacggagcgccgggcatcggaaaagacaccatcgcggaaatcatcgcccgcaaatgggagtatcggatcctgagtttcaaatcaccgatgtttgacattgcgcgcgccatcctgggtgcaaccgactttgcccgcttcgccgtccgttaccacgaccgcagccggaaagaagtaaagtgcgactttttaggcgaccgctcgccgcgtgaattcctgattcacattagcgaaaatttcgtaaagccgacgttaggcaaaaagcagttcggcaagttgctttgcgattctgtcgtgaattcgcctgttagttgcgtcgtcagcgacggcggatttgacgaagaagtagagcacatcgcggcgcacgatagcgtaaacgtctttgtcgttcgcctgcatcgtgacggcatgactttcgagggtgatagccgcaagcatattagccgcccggatctgatttgcgaaacttatcacgaattcgattttgatatgacgactggcgagccggaagacgacgcgcaaaaaatccttgatatggttttcgaagggtattaatattctctacgtaatgcctttattatcaccgccttaaactttgggagccttaacaggttcccttttttttgttctttatttggcccaacgcatatatcatcgcattatcacttaactaacagaggttgcatatcatgcgtgaattcatcaacgcggcaaccaatggtagcggcggtgttaccctcgcaggctctgcgaccgggcaacttatcattgcggccattggtttatttttcatgattctattcggctcattcggcgcgtggttgcgctggcgagattcaaaggcgctgcgtgaagcgctggaagccggggatatcaaaacggcggtgaagatcaggagtaaataatatggggattaaaacgcgggttacattcgcagcggcgatggcgatcgctgtcgccttcctcccgaaagtggaggacacgaaatacaaggtttataccgatatcgctggcgtttcgacggtctgcgaaggcatcacagggccggacgtaatcaaggggaaaacctatacccggtcagagtgtgatgcacttttggagaagcacatccaggtcgcaaagcgtgtggttgacagcaaaatcaaagtggccgtgccggacaccttccgggcgtcgatgtacagcttcactttcaacgcgggcggtggcgcatactccggcagcactatgctgaagttgacgaaccaggggcggctatatgaggcgtgcgaacagctttaccgctggacgtactatcgcaacccgaagacgggcaagatggaaaaatcgcgcggcctgcataatcgccgggatcaggaattcaatctttgcattaaggatctaaaatgagtagcttaaattttcagcgagcattggcaatcggcttcatcgtgtgggcggtcgcactggtttccggttgtgcttccagcgtcccgatcctttccgatctggtgggcagcaagccggatatgacggcgcaagtcggtgcggagaacgtgaaacaggcggttggcgtgacgaacaaaacggacacgtccagcaagcaggaaacgaccttcaaagaatcggcagttggcaaggttgacacttccaacaaaaaggcggtgacgacctccagcattcacgcgaaccagattacggcggagaagatcgagatccgaaacgacggtagcggaagtgtgattccgtggctgattggtgcagttggtgccatcatgttcgctgtcggtgttttcggtatgtggcgggaacgaaaaaataaaggggcgtaagccccttttttcatatgtaccgtttgacgtgcagcagcgccacgccatcttcatcattcaacccatgttcaaccttgtttgtcgcggccatgccttgatatagcaaggtgagcgcggcacgcaagtaattttctggtgtgatctgattcacgcaaacaagcctgtgaacctccgttatcagatcttccacctgctttcccgaatagggcttcatcgtcgagttgctcaatgtgcatcatctcccacatgtatttgttttccatcccttcaaacgaccggaagttaaatccaatctccctgttatccgggccagtgcaccacaccacgccgttttttccgtccaggtatccattcgtatagcttcgcgctaaaaactccttagaaaccattgaggcgaacatacggtgtgacacgttggcagcttttgccatgcgtggcgattcgcggtgcatgtaaacgaacttcgcaaaatcttgccgggtaaattcccggcgagactcgcagaatcggtaaatgtcaaggataaacattcattacctcatgaacgaaggattaacgaacacttccgaatcaatcacgcagacgaaacctaattcctccatcttcggcagcaatttttccttaatccttttactcaccccggactgacctttgaagatcttcagattgcggcacgcgttatagatgctctgaacagtcatcacgcctttcgactgcttgcaacggctggcgataacatcgtacacggccttaatctccgcaccctcaccagcgaagccggacgaatcagccgacgacaaatacgttttgctcaactcatgaaacatgatgatggcttcgtcgatcgtttcggttccgatcttcttcgagcgcttgccgccaggttgccagttgcggatagtgtggattaccgacgccaggcgcatcacctgcttatcgaatttacccatcgcaccgcgcagcatcgtatgcgaatacttcccgccgtcgcctaattccggctctaactcctggcgggccttgttcagccgacgcatgcctgcttcagtcacttccagcttgatatacgattcagtcataatgtcatgaatgaggcggaagtaatcagcgcgtaaagacttgtcgatcggctcataggtcgaattccctttttcgtcaatgaacacacgctcacctaaccgcgtttgctcgcgaaccaaaaggaaacgctctgatacaccgataccgcgagaaccagcttgcatgatggcgtcgatggtttcatcctgggcgattacgcaaatacagcccagcgcgacgaatgacatattgttactgacgtcggaacgtgcgatcgatacgtggcccttatcccacgccttcaacaccagttcgctgttcgtcttcttgccgccgtcgttgccatacgtgatccctaacaggctgttaaccgccgtcgcttcgtccgagataaccgcaaagttgccttgccgattgttgattttcgccaggccttccggcgtggtatcggagacggggaaggtcagatcgcacatgctttctaacttctcctcaagttcgtctttgtcttcgaacagtttcgccatatcagactgcgataactcgcctttcatggcctgcttgttggcggacaacttcgccatgattttcttgcgctctttcttgcgcgcctcgttgattcgctcaacctctgcgacaataggatcgatggcaagcgagttaatggcagacttaccagcggaaggcggctgcgacgtgataacgtaaagcgttgtcggttgctcgctgccgtggtactcgacccaaaagcggcccatcatcgcggcggatacggttccgagaaagtgcatgtaagcggatgattccgggaactgaacagaacgcgctgcatttagcgccagcttgccgacaacatcataatcattggcgatcgagattgttggatacttatccgcgtttacgtcgatatctttgggctttggccagaatgaaacggagtcacgatacccgttcgcacgaatcgcaacgcgcaggggactgatcccctccctttctgcgatggcgataatatcttgcggtgatacgcggtcatttaaaaacatgcccttgctcctgattggttaatcgttcggctaatcatatgccgtattaaatccgagatccagtgataatctaaacacgcttgaaaaacgcgcttggattatcggggcgcatggccccgaacccgtcacaggtatttagcttcgaaagtcgttccgtccgatacactgaagccaacttcctcgcggtacagcgtccagcggcatccatcacgatcgaagatgtatccggcaaccgcgccgagcgcacgaccgctttctacctggtagcgcttgccgacgctgaaggattttttcatcgggttgctatggtcaaggccgacgcattttagcgttttggtttttagttcgatgaacgtcgcaatcacctggccaccagcgccagcaataaacaactcgccgctaacgcctaccgacaaaataacgcgcttcttcttcagttcgacgctgtcatataccatcattgacacattgccttcatcgtcgacgcgggcgggataaaggttattttcgtgtatattaatagcgcggcttgacgtgcatttaatcttgattgacttcgccattttatttcctgtctcccatttcgatatagaggtttaccagatccagaaagtcggatttgtttctgcaactcaatttaaagccaacgtgcgattcgatcttattttgcatcgctgccagtgttgcgccgccattattcatcctgagaacttcgcggcatacttcggcgagcttttgagatatcatttcttcaccacctttatttccatgccttcgcaagcgctcttgatatcattaatcagacgattaagccttaaatcagtcattacatggtgatgacgtatatcaataattccagcaacgactaacagcatgacggcaaagataaaaccaccaggcccggacatacacaaaacagttaacatcatcaagataataaatttcatttccgttttactccgttgcgtttcgatggggtgattctacccgactttcgccgggtagttttagaaattcgtgctattctcgataattcgcctggaacacggcgcgggcaaaacctcgcggagtaatggaacgcagcattttagtcctttctgaccttccacccaaaaacttccaggcccaaaagaaattcacgccttctactccatccggcggcgtgagccgtttcggttcgacaaaaccgtttccgtgccatatgcacgttttcttcgtgtaattgtcacagtggggcattttgggatgccacacaggctcgttcggagaaacatagccaccgaagtcgcgcggatggaaataaaaatccggctttcgccatagtgacgataatttcccgaccgggttttcgaccatccaggggcaaccatacttattgcctaattgctcgaccatcttcgcatcccctgctgcggataatacgtcattatcttcccttacgtgcttgattccgctatgcgctaacagcgtgcatggcgggaaagcgaaaatgaagtcaggatctggaatgccgagaatcgatcgcttaacgtcaaaatccttgtcaatccaaatgttaacatactggatatttgggtgaaccattcgaatgctatattctccgtggtcgccggagtcggcgttgaaacagtacaccttgcatcccttgatggcccacggcaggcccatgatgccggagccgtcgaacatgcagtaaataaccttttctttcatgctttccacgcctcaatgaacattctgttcgattccagcgtcagcgtgacgccagccagggaggactgaatgagacgaccgcccggaaccgtcccgatgatgtagcggcctttcgacttcgtgatcgtgatctgagtgaagccggaggcgcggttcatgcggagaacgacgcggccatgagcgttcaggacggcgagaatggaatcagtcttcggatggttcattgtgtagctccttcgtttgttggtatggggacagtatgccactatcccgctgtgttgttttagcaaaacgtgctattccggaacgcaggtcgcgtaatcctggctgatgtagatcgtgcgctgaacgcgaggttcgagatcaccgagttcctggatggtaacatcgttgcttcctacccggcacggaaccgatccgaaaataaactcgccagtctgcttgtcgttgatttgccatacattaccgccttcctttttgacaaccaggaaaggcgcactgtctgcactgaactcttccgggccacgaccgtagtaatgcgtgatcgcagctttggccgcagcgctgaaggcatcggtaacgtcattggtcgccttgtctcggatggccttgatacgttcttcaggcgatccgatgatgtaggaaaagctgttcgaaatggtaactgttcgcattatattttaacctcgttttggtggatgaagtcggcgacgtaatggcattcgatcgggttctcgatacccgccagcacctcgcaagacccgttattcagtagctggcaatgctggcactccgcaccgccaacactggcaatgacaatggcgatcccgttgcatgaaccgccgaacattcgatgagggaagtggtaagcatcgcaggtgcaaaccacctccccggcccgccgtttcctcatacctggcccttctcgatgcagaaaacccaatcacgagcgtcaaccgcaaagcgtgcaacgccgtcgagcaccacgaagacagtaaacccgttgacgccgcgacccttctcgatatcggtcacggtgcggaacagatcgcttgcgccatattgaattttatccccgacgactacatccgcaaatgctttcatggttaatctcctgactggtttcgatgggttaactataccaggcctcgcggcccggcgtttagcaattcgtgcttatttcactgctttcttcgctgccttgtacgcctctttgaaagccggaacatcttcgaccggaatccagaagccggagccatagccatcgtcatagcaagggcattggtcgcagtagtcgccccaggttttctcttctccgccgacagagaatccagtgggcattttgcataacgcttcctcaaccgcttcgatcttgtcggcgtcgctatccatgataacgaagttccacttgccgttatactcgctgcccaggttgattgattcgcgttgaagtttcatagctttagcccctttggctcaattcgtttcgttgaagtcatcatagcaaagccgatcggatggattttaacaaaaaatgctattcctgcgattgctgattattccaccgattcggaatagtggaatagatggtgattgcacctgattccctggtgattagttttgacgaatcatgattgcttttgattgtttcattttgtgcaacgattttgtgagtgtttcaggatttgcaacgaattgcataaatgtatgcaccatgcacgcaatttgccgatcgaagccagcaaaagcgccaggtgtttttcgccaacatttacgtcgtgtggaaatgtgggggaggaataatcttacctaaaaattgcgcaaaaagtgaccaacataagcctataatagatatataagtatatgataaataataatattattattattactctttatctatatatatgtttggtaagatttcttcggggaggttatggattcctcttgcgcaagccatagtttttagatgttccgccgcgaaaaaatgtatatagggatatataggggatgacagcaaatcttaccaaacacgcttaaacccttttacggcaaggcttgcgggtggtaagatgacattcccacacaagcaaaaacgacgtaaatgttggagaaaaacacatgcaatataaaggctatgagttcgaagaagtcgacgtgtccgagtggatgcagtacgacgcagataagcaggcagcttaccatgaatggctgcaatccatcacgtttggcggctcaccaggggtagacgatcggccagttgctgaaaagtcacccgccgcattcactggtaatcgttcgtccgagatccggcgcatgttcctggatggcgggcgacgtatccagatgacggcggaggagttcgcggataagttcggcgttcatccggtcgacaaccatttccgcaggccgttgctgaaactcctggagccgggagaagtgttgcgggtgagcctgggggcggggttgatctccgtctttaccgagttcgacgcaatgactggctcaaacatggaggctgaggcatacaggcggcagggcgctatctccgagagggaaaggattaagggtttagtggccgctcttgctgtagactttgccggacatgccctggccgggatttacaaggcgaacttgttcgcggctatcgatcttggattgaccgccagcgatatcagccaggaagcggccaccacgcaatagcactttttgttaaaacccggtcagagcgatcgggtattgtctttccatcgacaacgaaccgaggaaaacgaaatggtcactcttatcacatgggaacacgaaaacagcgagccagtggtgcgcgaattcgagaccgtagcggcatgttacaacctggcggcaaatggtggcttttacaaggcgcagatcgttaacgagttcggggttgttgattatgaattttaaggcgagcgacgtaaaacctggcgtggtctacggatcgcgcctcaataaccgcctttggcggtgggacggcgaaactatgtggactaaaggcgagggcgatgttatctggcatgaatgcggctggccataccccaccatgagccgcctcgatatcgcttattatctttcggttggcgatatgcacgagatggaagatagcactttttgctaaaacactgctgtcgagatccggtattatttattcatcgacaacaaagaggagatgaaaatgagcaagaagaatccatattcaaccagcaactaccataacgaacacgtcatgcgctggcactggcagaaactcaaagaacgccaccttgcacgccatggcaaataatcacaatagcgccgcttcggtggcgctgtatcccaaccataaaaacggcttacaccaggaggattggccatgccacgattttcagcaacaacaaaacttcgcaccttcgccgggatgccgatcccatactcatcaaccaaagccgtccagggcagcgagcacggcgtatacttccactggtgcggcaagtggcgcttcaccgtcattcgcggcttttacgtgacctgcgaccacgtggatattaccgactattccggcggaaaccaggttcatgagttcaataggcacgaatagcactttttgctaaaactcgatcggggcaatgcgttattattaccccatcgaaacagaggagcaaaaaacatgattggcaaccacaacaacgaactgaacgcagcagcccaccgtcgcgccgtcgagcagaacttcaacgcgcttaaagtagcctgcgatgagatgaaagcaatgcttgaactgccgtcatgggatccccaactcgaagactattacgacggcctccgcgtcaagcgtgacgatatcatcaaccgcctgcgcctggctggaatgtttctgtaaggagaacgcaatgattcacgaaattaagtctggaaaacaagtagtggccaccatcacgcagcgccacgttgtagcatttcagtttaacatccccggcaccaacgatatgcagtctcttgacgtgccagtttgggctaacacgatcgccattgatgccgacggctcgatttgggcctacgagtcgaccgccgaggatgtttgcatcccggactactcgcgcaaagcctgggtggattgtgggccttccgaaaacaagatgcggtcagtaggggagatggatcgcttccatgattgggcagaatcgaagattgaccttcgcggcctgaaatagcacgcattgctaaacgcccggtcaagggatcgggcataatcatcacgaagtctattaacaaaccgattatgcaaggagacagaagaatgcaacaatttgaatctcgcggcaagacatacaacctgccggacactgctacccatgccgcccctggtgcgtgcggcggcctgtattttaaggatggcgatagttggtttttcatgggggatgtggttgggggtgtaccgacgaagacaggcagcttactcgtgggcttctacgatcacgacttggtggagttgaagccaaagcgcgtaccgttcgctttctggaaaaaaatcaaaggggcgatctttaaatgaatcaattcgaattcctggcgcgtgcgcaccgtgcgcttgcaatgtacgccttcagcaagaacatgaagattatcagtgttgaggttgagttcaacaatatcagcatttccggctacgttggcgactcataccacgtgacgaaattcagcttcccatcgctggcttgcctggagcgtgaggcattcggtttctgaatagcactttttgctaaatgcccggtcagcagatcgggcataatggccacacaccaaacaacggagattcaccatgattcgcactaccagaccactacccaataacctttacgccacgattggggttcgcgcggtgagacttattcacatcaacgaagttggcaacgtggctattttgtggtttaagcgccactcaagcggtgttggcctgagcattcaaagattcgggcgctttaacggcaactcccaaacccattctcattgggttgatggctcatactgctggacgcacgttaagcacgtcgagaacttcgacgccaaatcactgagcgacgacgacgcctggaagatggtaacagacctcttcggttatgatgcctgcatggaggtagttggatgatacgtttatcagacttcgatcgccactgcttaaccgggcaatttggcgaaaagccagtaatgtgcaagatctcgaaggtaaaaggcgaccccgtcgagcaggtcaatacgcttaaaggcctggcaatgcgcaaccgactttacatccatgtgcgcggcagactgttcgcacagcaggttcatttttcgcatgggacgtggttctacactggcggggacggggttggcccatcgcagaaaagggttatgctgcgcgagataatcgaacacggttacgtttggactaacgggatctactaatggaaacggtaaaagtaatttgcacgcacgctggctattcgccgctatccacctatttcacgcctggccgcgagtatgacgccatgttcggccccggccttgatgaagtgtggattttgcaggacgaccagaacaccacggaagacgaagaattttggccagcctgccgcatgccggacgaaaagatcgccatgtacgccaataggccatacgaaaacaacgttttgtttgaggtgaaagtatgaaagtaagcaaaaagaaactcgcgctgtattgggccttcttcctggctggccttgccctgcataacagcgtgggctggcagacgatcggaatgctgtgcatgattattggtgtatgccgactgtctgagattaacgggttccgccgtggatatcgggcagcattcagcggcgaaaaagaatagcactttttgttaaaactgccgtaacgtcatttgataaagtggcgttactgaagtgaaacaatccaatcaggagcaacgcaatgaacgataatttaatcgcactgctggaagaactgaattcctacggctgtgcatacatcgagctttctagcgaacacgttatcgaagtcattattgacgatgacgcagggttcaccaagttaagggtggctaccggggccgaagaggaattcgaagactgcggcatccgtgaagtaaccaaccttctcgaagttcaccaggtgaaggagatccgctaatgaaaaccgtcaaactaatggttgtcaatgcggcccgcgaacgtgaacgccaccttatcggctgcgtattcgatgccgtcgaggtaaaagactcaaaaggagactttcacgtaatacagggcggataccttaacgaatttatcgtcaatccgctggatactgacgaagatttgaccatccgtgttggtagcgagccggaaaacgcgcttttccacctgcgtaaagtatcgaaggcatcgcagcgcaagttgctggttcgcgcactgaagcgcatagcgaagcagcgcggctacaccgatgcatacatccgcaagttcggcacgttcgctggagtaggtgattgggcgcggtcatgggccgacttttatttcaacaaatccggcgaattttgttcagcgcatacggactggctgcatggcacggaacacgatccagttaacggccacgagtggtacgaattcattgaggcggaattagacgccctttgatagcacgaattgctaaaacgaacgtccggggatggtgcatactatccccacactaacgaacaaaggaaattacccatgaacaaaccaaaaatcatcctgatcccgtccgtcgattccgtggttaatacttatgctaaattcaccaaaggcaagcgctataccgcaaccgcatttaccaaatgttccggcgaaatgctgtacaaggtcagcgatgactacgggcgcgagtatcacgtaaacccaagatcttcgcactatcttggtggccatcgcttcgatattgagtacccgatcgaagattgcagtaagcgcgactcgttcacctacgatgacagccgttctatcgccattcgcgctgcaaccatcggggacgggtttattagccgggcctgcatcgttgatctgatcccgtccgataatcacgccaaagacgacgccgacacgctgttaaatgccgtcgttcgcgccggaatcggcttggagttaagtgatgcgtcgtgcgaatcattcatgcgtgaaccgttctcacgaatcgcggagcttgaaaagcaagttgcgttcctgactggtgaacttcaggccgcaaacagcaagatcgagaatgttcgcaaaatcatgcgtagcaagcctggccatgacattgaagattacgcgcgggttttgcgcatgatggccgacgcattcgccaaactttagcagtagcacgaattgctaaaacagatcaggggtaagctggtatagttaccccatcgaaacgaaacggagttacagcaatgaaaatcaaaataaccaaaatcaacactcttaatggcgacggctcaattaccctggaagaatgcggcctcaaaatcggcgaagttcttgaggtcgacggccacttcaacgacggctcctactgtgtgattgctccgcgcaatagcgagtttatccaggctggtgacaatatcagcgtgagcgaagatgaatgcgaggttgtggaagaatgagcaacaaaatttgggttctaacctacaccattggaaccaacgaggggcgcaaatcgcgccgcctcatctgcgacaccaaagagcgggcgattaggcagcaaaccgttcttggtggcgaggttgtcgagtatctccgcaagcctgaagcgttcaaggtgaactggccggaaggcatggatatcaacggcgctttagcgagcctgcgtgagatgcagcacaacccgaagacgtggagcgaccttcaatgcctgcgggcagagccggaagtgaaggccgacccgttcaccaatattcgggcgcagcacgcggaatggtcggatcgccagttcggtaacgttgggccagttgggccgctcaagcacctggcgaaagaggcgatcgaggccgccgaagcgccggatgacattagcgagttcgccgatatcatcatgttggtatgggacgcaacgcgccgcgccggattcagtgatgagcagttggctgaagcggtggcggaaaagctggaacggaacaagcgtcgggcgtggggcgaggtcaaagatggcgagccttgccaccacgtgaaaaattaacgaaatcgaataccgtttaaagcgcctgtaagccattctggcgggcgcaaatttaaggagtgcgattgtatgcctgaatactcaaaagtcgaagatatgccgattggcgcaacgattacgggtatccgtatgagtgagtcggtcgacacaatcgagccgctggcgttcccggttacgcaggtggagacggacagcagaaaagggttcatcttcatctacaaaaatttcaatagtccgctgcgtgttgaagtgttcattgctcgcggaacctgggtagaatgggagaaggacaaatgttcggactgaatgaagcgcagtacaacgctgtgaagcgcatagcaaagcagatggccgcagaaacaaaagacgccatcaagaaggacaagaagacctacgatcaggtcgccgcgaagatgatcgataaacattgggcgcaaatcaacacgctggttactcgcggccagtttatctggatagctggctacctggaaggccgattcggtcgcagggatggcgagtatgaataaaaaacaggcaaacgaatcagcgacctattgacgtcctcgcgctgaccgggtaacttgaaccacgtagacacaagaggcggtaaacatccgcaagtctggccccgctttggggcatttacaaaaggggttgtgatgcagtacaagatcatgctcacagcaagaaaaatgggcggcttttgcaagtcctgcattcaagagtttagcatgacgattgaggcgaacgacaccgccgacgcggtggagaaagcaaaaaagcaatccggcgttaatctggatacgcataaaatcaacataaactacataagggaagtcaatcaatgttaactctgattattgcactgttaatgctgttcataggctatcatgttggcgcggctcatcttgtcgagcgcctttctaagcgggtacatgaaggcacgtttgctgccatgatgtacaataagaaaactgcacgttgggaaaaaattggcgatccggatggtatcgcaaagcgcataacgttttcgccgcttccgtatgttgactgcgagcctttcgtgaaactacagaagacgcttaatcggcgaaacaaactgatatgatacaacgacccgcttcggcgggtttttttatgcctgcaatctggtatactcgcaactcaacaaagaaggagggctaaaa

SEQ ID NO: 248 - DNA, 49833 bp, synthetic construct
  source 1..49833: mol_type = other DNA
tgttggtcactttttgcgcaatttttaggtaagattattcctcccccacatttccacacgacgtaaatgttggcgaaaaacacctggcgcttttgctggcttcgatcggcaaattgcgtgcatggtgcatacatttatgcaattcgttgcaaatcctgaaacactcacaaaatcgttgcacaaaatgaaacaatcaaaagcaatcatgattcgtcaaaactaatcaccagggaatcaggtgcaatcaccatctattccactattccgaatcggtggaataatcagcaatcgcaggaatagcattttttgttaaaatccatccgatcggctttgctatgatgacttcaacgaaacgaattgagccaaaggggctaaagctatgaaacttcaacgcgaatcaatcaacctgggcagcgagtataacggcaagtggaacttcgttatcatggatagcgacgccgacaagatcgaagcggttgaggaagcgttatgcaaaatgcccactggattctctgtcggcggagaagagaaaacctggggcgactactgcgaccaatgcccttgctatgacgatggctatggctccggcttctggattccggtcgaagatgttccggctttcaaagaggcgtacaaggcagcgaagaaagcagtgaaataagcacgaattgctaaacgccgggccgcgaggcctggtatagttaacccatcgaaaccagtcaggagattaaccatgaaagcatttgcggatgtagtcgtcggggataaaattcaatatggcgcaagcgatctgttccgcaccgtgaccgatatcgagaagggtcgcggcgtcaacgggtttactgtcttcgtggtgctcgacggcgttgcacgctttgcggttgacgctcgtgattgggttttctgcatcgagaagggccaggtatgaggaaacggcgggccggggaggtggtttgcacctgcgatgcttaccacttccctcatcgaatgttcggcggttcatgcaacgggatcgccattgtcattgccagtgttggcggtgcggagtgccagcattgccagctactgaataacgggtcttgcgaggtgctggcgggtatcgagaacccgatcgaatgccattacgtcgccgacttcatccaccaaaacgaggttaaaatataatgcgaacagttaccatttcgaacagcttttcctacatcatcggatcgcctgaagaacgtatcaaggccatccgagacaaggcgaccaatgacgttaccgatgccttcagcgctgcggccaaagctgcgatcacgcattactacggtcgtggcccggaagagttcagtgcagacagtgcgcctttcctggttgtcaaaaaggaaggcggtaatgtatggcaaatcaacgacaagcagactggcgagtttattttcggatcggttccgtgccgggtaggaagcaacgatgttaccatccaggaactcggtgatctcgaacctcgcgttcagcgcacgatctacatcagccaggattacgcgacctgcgttccggaatagcacgttttgctaaaacaacacagcgggatagtggcatactgtccccataccaacaaacgaaggagctacacaatgaaccatccgaagactgattccattctcgccgtcctgaacgctcatggccgcgtcgttctccgcatgaaccgcgcctccggcttcactcagatcacgatcacgaagtcgaaaggccgctacatcatcgggacggttccgggcggtcgtctcattcagtcctccctggctggcgtcacgctgacgctggaatcgaacagaatgttcattgaggcgtggaaagcatgaaagaaaaggttatttactgcatgttcgacggctccggcatcatgggcctgccgtgggccatcaagggatgcaaggtgtactgtttcaacgccgactccggcgaccacggagaatatagcattcgaatggttcacccaaatatccagtatgttaacatttggattgacaaggattttgacgttaagcgatcgattctcggcattccagatcctgacttcattttcgctttcccgccatgcacgctgttagcgcatagcggaatcaagcacgtaagggaagataatgacgtattatccgcagcaggggatgcgaagatggtcgagcaattaggcaataagtatggttgcccctggatggtcgaaaacccggtcgggaaattatcgtcactatggcgaaagccggatttttatttccatccgcgcgacttcggtggctatgtttctccgaacgagcctgtgtggcatcccaaaatgccccactgtgacaattacacgaagaaaacgtgcatatggcacggaaacggttttgtcgaaccgaaacggctcacgccgccggatggagtagaaggcgtgaatttcttttgggcctggaagtttttgggtggaaggtcagaaaggactaaaatgctgcgttccattactccgcgaggttttgcccgcgccgtgttccaggcgaattatcgagaatagcacgaatttctaaaactacccggcgaaagtcgggtagaatcaccccatcgaaacgcaacggagtaaaacggaaatgaaatttattatcttgatgatgttaactgttttgtgtatgtccgggcctggtggttttatctttgccgtcatgctgttagtcgttgctggaattattgatatacgtcatcaccatgtaatgactgatttaaggcttaatcgtctgattaatgatatcaagagcgcttgcgaaggcatggaaataaaggtggtgaagaaatgatatctcaaaagctcgccgaagtatgccgcgaagttctcaggatgaataatggcggcgcaacactggctgcgatgcaaaataaaattgagtcgcacgttggctttaagttgggttgcaaaagcaaggctgactttctggatttggtaaacctgtacatcgagatcggagaaagaaaataaatggcgaagtcaatcaagattaaatgcacgtcaagccgcgctattaatatacacgaaaataacctttatcccgcccgcgtcgacgatgaaggcaatgtgtcaatgatggtatatgacagcgtcgaactgaagaagaagcgcgttattttgtcggtaggcgttagcggcgagttgtttattgctggcgctggtggccaggtgattgcgacgttcatcgaactaaaaaccaaaacgctaaaatgcgtcggccttgaccatagcaacccgatgaaaaaatccttcagcgtcggcaagcgctaccaggtagaaagcggtcgtgcgctcggcgcggttgccggatacatcttcgatcgtgatggatgccgctggacgctgtaccgcgaggaagttggcttcagtgtatcggacggaacgactttcgaagctaaatacctgtgacgggttcggggccatgcgccccgataatccaagcgcgtttttcaagcgtgtttagattatcactggatctcggatttaatacggcatatgattagccgaacgattaaccaatcaggagcaagggcatgtttttaaatgaccgcgtatcaccgcaagatattatcgccatcgcagaaagggaggggatcagtcccctgcgcgttgcgattcgtgcgaacgggtatcgtgactccgtttcattctggccaaagcccaaagatatcgacgtaaacgcggataagtatccaacaatctcgatcgccaatgattatgatgttgtcggcaagctggcgctaaatgcagcgcgttctgttcagttcccggaatcatccgcttacatgcactttctcggaaccgtatccgccgcgatgatgggccgcttttgggtcgagtaccacggcagcgagcaaccgacaacgctttacgttatcacgtcgcagccgccttccgctggtaagtctgccattaactcgcttgccatcgatcctattgtcgccgaagtcgaacgcattaacgagtctcgaaagaaagagcgtaagaaaatcatggcgaagctgtccgccaacaagcaggcgctaaaaggggagttatcgcaatctgatatggtgaaactttttgaagaccgtgacgaacttgaggagaagttagaaaaattgtgtgacctaactttcccggtatctgataccaccccggaaggtctggcgaagattaacaaccgacagggaaactttgccgttatttccgatgaggcgacggcggttaacagccttttagggatcacgtatggaaacgatggcggtaagaagacgaacagcgaactggtgctcaaagcatgggataaaggccacgtatcgatcgctcgtgccgacgttagcaacaatatgtcattcgaggctttgggctgcatttgcgtaattgcccaggatgaaaccatcgacgccattatgcaggccggctctcgcgggatcggggtatctgaacgcttccttttggttcgtgagcaaacccgtttgggtgaacgcgtgttcatcgacgaaaacgggaattcgacctatgagccgatcgaccagtcactgaaggcggattacttccggctgattcatgacattatgagcgagtcgaacattaagttgcaggttactgacgcggcaatgcgtaggctgaacaaggcccgccaggagttagaaccggagttaggcgacggcggcaagtattcgcatacaatgcttcgcggcgcgatgggtaagtttgataagcaggttatgcgtctggcgtccgtgattcacacgatccggaactggcaacccggcgggaagcgctcgaagaagatcgacacggcgaccattgacgaagcgatcattatgttccatgaattgagcaaaacgtatttgtcgtcggctgactcttccggctttgctggtgagggagcggaaattaaagcgatgtatgacgttatcgccagtcgctgcaaacaggcaaaaggtgttatgaccgtccagggcatttataacgcctgccgcaacctgaagatcttcaaaggccaggccggggtgagcaaaaagattaaggaacgcttattgccgaagatggaggaattaggctttatctgcgtgatggattccgaagtctttatcaacccgtcgttcatgaggtaattgatgtttattcttgacatttacaagttctgcgaatctcgccgggagttcacccggcaggattttgcgaagttcgtctatacgcaccgcgaagcgcctcgactggcaaaagccgccaacgtatcgcaacgtatgttcgcctcaatggtctctaaggagtttttagcgcgaagctatacgaatggataccttgacggaaaaaacggctctgtgtggtgtacggggccggataacagggaaataggttttgatttccggtcgttcgaagggatggataaccgatacatatgggagatgatgcaccttgaccaactcagtgatgaacagcttttcgggaaaccaggtggaagatctgataacggaagttcacaggcttgtttgtgtgaaacagatcacaccagaaaattacttgcgtgccgcgctcatcttgctctatcaaggaatggctgcaaccaacacggttgaacatggtcttaacgatgaagacggagtagcgctattgcacgtcaagcggtacatatagaaaaaggggcattacgcccctttgttttttcgttcccgccaaagaccgaacgcacctatcgccagcattacaaccccaacaccaccaatcagccacggagtcaggcttccgctttcatcgtttcggatctcgatcttgtccgccgtgatctggttggcgtgaatgctggaggtcgttacggattttttgttcgacgtgtcaacctttcctaccgccgactctttgaacgtagtctcctgcttgcttgacgtgtccgttttgttcgtcacgccaaccgcctgtttaacgttctccgcgcctacttgcgccgtcatatccggcttgctgcccaccagatcggaaaggatcgggacactggaagcgcaaccagacagaagaacaaccgtaagagccacaccaattaccttaatcattttagatccttaatgcatagttgatattcctgaacccggcgattatgcaagccttttgacttctccatcttacccgttttcgggttgcggtagtacgtccagcgatatagctgctcgcacgcctcgcgcaatcggccctggttcgttaatttcagcatggtgctgccagaatatgcgccgccgccagcgttgaacgtgaagctgtacatcgacgccctgaaggtgtcaggaacatctactttgattttgctgtcaacggttcgctttgctacctggatatgcttggttaaaagcgcgtcgcactctgaccgggtataggttttccccttgataacgtccgggcctgtgattccttcgcatacagttggtacgccagcgatatccgtataaaccgtgtatttagtgtcctccacttcggggaggaacgcgaccgcgatcgccaccgccgccgcgaaagtaagccgcgttttcattcccattttatttgctcctgatcctcaatgcctctttaatgtcgccagaatcaatcgcctcccggatggcttttgagtctttccacttcagccacgtgccgattgagccaaataagatcatgaaaaataaaccaatggcagcaatgattaattgcccggatgcagatcccgcaagggcaacaccgccgctgctattggttgccgcgttgatgaattcccgcatgatatgcaacctctgttagttaaatggtaaggtgatgatatattcatttggcaaaattaagaacaaaaaaaagggaacccgtcaaggttcccaatcgttaaggtggtgataataaaggcattaactttataattttaatgcaacatctgaaaccatatcaaggattttttgcgcgtcgtcttcaggctcgccagtggtcatatcaaaatcaagttcgtgatacgtgtcacaaatcagatcgggtcgtcgaatgtgtttgcggctatcaccctcaaaggtcatgccgtcacgatgaaggcggacgacaaatacgttaagcgcctcatgcgctgcgacgtgctcgacctcctcatcaaaaccgccgtcgctgacgatgcagttaaacggcgaagttagcgctgaatcgcaaagcaacttgccgaactgatttttgcccagggtcggcttgacgaagttttcgctaatgtgaatcatgaattcacgcggagaacggtcgcccaaaaaatcgcatttcacttctttgtgcttgcggtcgtggtatctggcggtaaagcgtgcaaaatcagtagatccaagcacagcacgcgcgatggcaaacataggctgtttgaagctaaggttcttgtattcccacttccgcgagataatttccgcgatggtatcttttccgattccgggtgctccgttgagaataattacatttttcatttgtctactccgtgcgattttaaatgatcttgaagattgtctccgtagtcgcagacctggtaagtcgtaatacccaggccgcgcaagtgcgcaataacattgggtgaatcatcccatgccgcaacaatgcgatcaattccgattttgcgtaactcctcctccttgattaccgtgtctttacggttgtcgctggcgcgacgcatgatgagcctgtcatatttcaccccgtaacggtcaagccaaatcattgtttcggtcttcacctcatcggatcgcccggtcaggataacgacaatcatcccggagcgatgaagcgcattcgctacatcaattgtgctttggattgggctgtcgccaattgatgcaccattaaattcactccaactttctgtaaggtggagatcctttttcggcagcaggtgcaagcggtggttgccattggacaacgtgccatcgagatcgaaaatgcagatatttctattcatcggttttccttgttggcccctcgcggggccgttgtggttacatgttcgggcggtagataaagcggcctacttcgccatattctttgctgtacagaataaccgccgcctggcgataggagcgccaaccaccgcgagcggcgtaagcgtctttggcccctaactggccatgcacctcgtcaatacctaacgagtgttccgttacagtctggtgatgccagtggccggaatgcgtgtaaatgtagtcgcactggccgaactccttgcggaagtcggtagccatcgcagcaaggcgcgtttcaggcttcttcatcgtgtggccatgcgtgtagcccagcatggttttgccccacaaggtgcgatgcaggatcgcagggctaacatcaacaaaaacgcgcggttcattctcatagaacgccgccagcgctgcgcgtagccaaatcatcccggcctggtcgtggttgccttcgattacctgcacttcaacttcggcatgattgttaagcagtagcgacacggcgcgacgcagcgagcggatggcaacataaacaagttttgcgtatcggctgtcctgatcgagaacgtgaccacttgccggggttactgcgtccaggccgtcgctgtgaaggaagtcaccgccaaccagcaaaacagcctttttggattgcggagccaccgacacggaataatcaaagaagcggtttagaaccttctctgccgtgctggtatcatagttctcgccgcattcatgcttatgcgccatagccccaatatgcaggtcgaagattgggtacagggcaagctgatcttcaatgtagaacttcgactcatccagcggttgcggttcagctcgcggaaggtcttcgcagaaagccgcctgcgccgcctccataagcgcgaccatgcgatctctgtctacttccgacttgacccaccgaacgacctcggagccgtccgcgcgaatcatcgtcgacgtgcctttgacgccgaagccgtccgggatatgcttcgaaacgtgggcgtttccgtgtaggtgtccttgtcgtgccaggcgaacgccacgacgttcaacgcttcgaatgttcatgccgaactcttccgcgatctcgcggtaggtcttaccttcctcgcgggcggctaagaattcttcgtctgtgattttcggtaacataatttatcctaattgaattgcgcagttcatgattgcgatcgtgaacaggatcgccgtaaataggatcgcaatatatcgcattcttcacgcccccgctacttgtaatattttttctgctgtttcgactcatgtatgaacatcttcagcgcgtcggcctccgcacgcgttgccactgctattcgcgtgcgcttcaccgggcgctcgtttagataggtgagcttcccaccaaagataattgatatatctttgatatcgaaatactttgagatcttcacgatatcatcacttattcccgcttcttttgcgtgctgccatacggcagcgcgaccagtctcgacaatcatcattcgtcaccgtaaatgcaaaaaccttcggccatttgctcatacatggccacgctttccagtccataaccagcgcgaaaataaatctcaccgactacaccatcaaggcaattatctgaagggttcgccatgtagtcggccatgcacaggcgagacaggttaaccagttgacgcgataccacttgcgcttttactggtacgatcttgatggtgtctgcaatggttttggttttcatggcgtttgctcctgattggttggtggagtaataatacccgcacgcggcgggtattgtttagcaattagtgctgttttgcgaaatactccgcgccttcatgtgatttaaactcaatcaattctcgttcaagaatttctggccagtcagcgaccggggttccgttgtccatgaactccatgtaggttccgtcgatggtgtcagcaaaggctaacttttcctcatccgtcccaatgaagccgtgcttgtccagaagttcaacaacgatccgaagatactcggcgaaagactctgtctgttccatttttcagatcccacgtttgcgcatacgctttttagctaatgacgggcaaatctcgcttaccggaatgtaaagtgtcttttgctcctctcccggcttgagcttgcgcatgatgaaaataacacttcccttattgttgttgtcgactggattcccgcttaatccattgatgaaggcgaggcgaccggatcgacttaacttgttcccgtaatcatcctcttcaacatcggcaacaatccagataatttcggcggccatcttctgcgcgtcacggaaccaggcagtagaattgtcgccgggtagcagaatgtcgatctggttgtcgtgctccatttgctcaatggccttgagaataaacggatctggaaacgagtaaggaggattcagccaaatgtgcttgtttttcccccaccagcgtttaaggcaatccgttttttcgtcgtagaacttcgggcaaactgcgttgcttcggtctgcggcgacatcaagatcgtaattgccgtaacgctcttccatgtatgcgatcagacttcgatctgtcgcccacttgtcgcgcacaatatccggcgttttactacctgcgtatcggttgccagttacctgatagaacttatctggcctgacggcttgatagtgtccgccagtggcaagggcgttgccaataaacgtttcgcgctccaattgctcaaacgtgatgaatgcgtcatgagtgtctttgtctgcgatatcttttgccattattatttaacctcgcaggttaaggtattgtgaaaagcgcccacgctaacatcaatagtgtttttgttgactgcataatgagcgtacccaaaaggagtaagcagtttatattgattttcgccagcgccatcaattataacgccagagttttcacccttgacaactttcatatagttgctagttacctcaaacgcttcaccaccgcaatcatatgttttcggtttttcgctgcaaccaataagaccaagagacagaacaactaaagccagcatctttttcattttcaacactccattcttcgtttcgatgtggaaatgatacccggctttcgccgggcggttttaacaaaaagtgctattttatggcatcgcagaaagcaatcttgaattgctcgaagccataggccacggcggcgaatccgccgcgacgccgggcggcagcaaggaattccctttgctccttgctcactggcgacgcctgcgccttaccctggcgctttagctcaatggctgcgaacgggtatttgccaccgaaaccaatcaggataacgaagtcgctaacgcctttaagcaatcccatttgatgatcgataaccgcgctcgccttgtgcttgctgccttcattgactgtgtgccagaacagataatcagggtattcgtgccgcagccacgaaacgctattcatctgatcgattttctcaagcggacaagccttcacaggcccgccgtagtattcgagataatcacctttatctgcgatcattctgcgtctccaaaatctttgcgtgaaataatatcttccttcttgccgttgatgcgatgcgttacgcgcttcggtgcgcggaagtattccgcatactccaggatcttgcgggcgtttttcataccgcccaacttgccacgcattaccgcgtcgtcaacgtgctgggagactgccttttgccgccacaacttgccgcaaatctgattctctgattccgggaagaacttttccctggcggtgaaccgctcgccgtcatggttcagtaacacgtaattgaagatgatcccggactgattgcgagtcaagccgatatcgaacccgacaacatcataccagtcattctgcgtataatgcttcccggtgagattgtcgttgggatctttaagctgcaccccacaacatctgcactggcgggcaacaatatcgttttcggcgtaacaaccttttaccttaatcttccctgttcgcgggtctttctggtcttcgcagcgctgcgatatccagaaatattcgcaacgattgccgttgctgtctttgtggatgcatcggcgggcgtactcgctattttctcccttgcataccgggcaaattttggggccgttcttgctgctcttgcgtctttggtattgcgcctgctccaaaatcggatcgaaatacaactggccaaggtcatccattgttccggcaaaatcccagacaaggtgatcttctttcacccacgagtaaggaggctgtttttgccagtcctttagaagccgcatacctcgccccaaaagctgaataagcaacgtaagcgatccgatcttgcgcaatatcaccgaaaaatcccaaaacggaacgttaacgccagtggttagggccatcacctggaagatgtatttaatctccccgcgattcgccttatccaaaatttcgccgcgtttctttgagttcgtcttttcggtgatgatcgcgtatgttgcgtccggcggtagatagctcgccgcctccttgcaatgccgctgtccagcgcaagttatcagaactccgtttcgggttttcgcacgctccacgaccttttgcataatcagcttcgtcatttcgccggattcatggattttcttttccatcttgcgcaattcttccgcgctaaaatcctgcgtaccgtcctgactggaaccgtggaattctgacaggtcataccctaacccttcggattcagtatcaccaaaaattgtcggaaccaccgatccgaactcgacaagatagtttgtgttaatgtcggtgatctgctcgcgccaaaaaccaggctggctcttgtcttcctgtaaaatcggaatgacgccgcgaaactccgaacccgtatagccaacgatgcgaagttctcgccctgtcttctcaaggcacctccgcattaactcacaaatgacgatggtgtactgtgttcgaccgccgccgaattctacgtagtcgaatttttcgtcgtatgggtggtcggcatcgaccagttcaccgttcacgcgatacggcttatccttcggtctgctcatgtactcgaacgattcattgttggcgatcgcctccgccaaatcttgccagtcaacctggtggcattcgtcaatagccagaactgaaggtgtatagtcacccagcattttaaacagaccattaaccaccgtcccttcagatccgacgacgatcgggaagtatgccgccttcgtgcccaacccggcacaataaacggagttcggaacgtcgaggttactgatctcctctgaatcctgcttcacgatctcggcctggcgagcaagaaccatcatgggtaagttcattgccttgcactgcgctgcgagcatggcgatcatgatggttttcccggcggaaaccgaagccttaatgtaaaacggatgttcatattttgcgatccgctttgctgtctcaatatacgccaccgcctgatatgggtatggaacgatattgccaaccgtgaatcgcttttgtattaacgtgatcttatctgcgtaggcttcaatttgttgttcaattgtgagcatgggcaatcctaatttgtcattcgcatagttgcgtgtataatacagggaacattttatcatgtttaacaaaaaatgctatgagggttaaattatggaacaaatggcaaaggttgataagcgaaccttgaacggcaacaacggaacatcgcgcgggaaagataagaagaaacgcaagcgaccgactggttactacgtgctgaaggatgaggttcgcgccgggttgactgcgcggatggagttggttattgatgccttcggtggcatcgctggaacggcaaaagagttgggggttagtatccaggttgttcagcagtggcgtaagcgcggcatgatctcagccgatggcgcttatctcgtacataagagctaccgacggaacaattgcaaaggattccgcgcctcattctgccgaccagatttaagatttgacagcaacggaaagccagtgacgcgccgatgcgaccgccgcgaaatgctccgcgtagtccgatagcacaatttgtctaaacactaaacgcctgccgggttatcattctcgtgtgggcgtttttttatttggaggtaacgacgtggatttttacgatgaaaaagaggttttgccgtacatggctggcatgtggcgcgaagcgttgcagaacatttgcggcatccactctcgatacttcaacggcaagcaccaggactgcccgaactgcggaggcaaagaccgattccgctggactgacaagttagaaacgcgcggagacggcggcgcatactgtggaggctgcggtgctgataaggggatcggctggttaatgaagttaagcggccagccgtatagcgagtgcatcaacattcttgggcgctatctcggcaaggttccgcaagaatacgtggtcaagagaaacaagcaggtagctcgtgataacgggtatgactacggaaagatggcagatcatgaaagagtgatggcagttttaaacagaacggaggccgtcgatagcacgcctgtaacgctctatgagggcattgaaaatgagtatatcaaatcatatcaggttggcgtaaaaactcacgagaacggcagacaggagctaattcacgcgctaccaatgcaactcgtgcatgaggatgggccagatgatgagtattgcaacatgctgttcattgatgaggagggtcgggagaagatgttggctggcgatctgaccttcggatcggtgatagtgaccaatcagagcgacgacggtaacgggccaatttaccttgctcaatcctggattgaggcgatgcacttcaatattgctagttcgttcaagtgcgacgtttgggcctgcatcataccttcaaacgtcgagatcgtggcgtacaggtataaaggcaagggcggaaaaggtaagcgagaaatgcgggtagtttgccgtcgtggagatcgggatatgctggcggctgctgacgatcgggatcttaaagttatcgttccgaacggtgacaactttaagctcggatttgaacgtaagttgtacaaggcatcgtcgcttctctgattaaatattgatcagattttaggtaagattgagcaaaatcagtcttacctttttttattcctgaaattcagtggcttacaactggtcgaaccactttaggtaagatttagtaagatgaatcttgcgtaaatttcgcgcaaaatttaaccaactatccgccatatatagatagtaagtatatgataaataataatattattattattgttctatctctctatatttatcttggtaaggtttctccgggtacgtgtcttttgctttgcgatcccgcgccagatttttcgtggatatttacctatagggatcttaccatcttaccgatttgcattaactcaatgaaatgtatggggaaagtcacgtaagatgcatcttactaaatcttacgtaaatttcgctcattttttaaccaattgcgaatagcactttttgccttgcacctgtaatcgtcatgcgtatacttaacgcaacgaaaccacaaatggagcaatatcaatggctgaagcaattttcagggcatacacaagcagtgaattgactaacgagcaatatcacgatcctgattcctggtgcgcggaatacgttagcggctcaagcctcggcgagatttacgcaacatccccggcgcactggaaattcaaggtgcgcgaggaaaccgccgcgctggcgttcggaacctgttcgcatacctgtatgcttgagacggcaaaatttaatggcgagtacctgcgggcgacttctccgggcgaggttaaagatctgattacgtcgaagtcggcactgtctgcgaagctgaaagcgtgtggcctgattgggacgtccaacaaggattacccggaacttctggagatggcataccgcgccgggattgacgtaaatgtttggtgggcgattgaactatgcgacgaaagcgccgcgatgaactccgggcggaagctggttagggatgttgatttcgatgcggttgttcaaatgcgcagcgtgatgctggccaacccgcgacacgccgcctgtatcgaatcacctaccgcacagcgtgaattgtcgatcttcggtgagatcttcggcgtcaaggttaaggttcgactagatcatgttgacgttgtttccgatcccgaactaatcaaagagtggggattcaaccctgatgaagttttcgaggtcgtggtgattaccgactacaaaacaacgcaatcttccaagcctgacgatttcgggcggctcgctttcaaccttggttactatctcaagatggcattgcagcgcgatctgttcgtgaagacctacaacgaaaaacgcccggtagttgtcagactgctaacgcaggagaaaaaatcaccgtttgctccgcttgcgttcaccctgaccagccagcagatcgatatcggtcgcaagcagtatcaaagcgtgattcatcagtatgcggaatgcgtgaagcatgattcatggccatcatatgagtcaaacgcggcggaagtcgttttgcctactccgcagttcgtgaaatatatgttcccggacgtatacggcacaaatagctaaacactggtgcgcacttgtgatatagtgcgcattaccaatcaggaaaaggaaactttatcatgcgtacatctgaaaaatttacaaccatcgcagcagcattaatcaaggcaaaatctggcttcgttgccgcgaagaaaagcgggaagaacaaccacctggggaacacctatgcaaatcttggggatatcctcgacgcgatttccccggcgcttgagaaaaacaaaattatggtcattcaatccatgatggataccagcaccgaaaaggttatgcacctcgaaacgatgttcctgcatgaaagcggtgagttcatggcgtttcagtacaatatgccgatcagtaaaaccgtcgaacaagcatacggctcaacaacatcttacgcccgccgttatgcactggccgcagctctcggcatcaagcaggcggatgatgatgcagaaattacgaagatgacgccgaaagacttcaaaaaacgaattgacgcgtgcgaagatctcgaatcgcttcgtgagatctataagctggcgaaacaaacgttaacgcctgcggaatggaaaatgacggaagacgatatcaccaaacgccaggcagaactgaaagtcaccccggcaaacggcttcaatcctggtaagccgcaagaggttgcgaaacgtgagccggaaaaggtagaatcaaaacctgaaccagaagcgcaagatatttcatctttcaactaatttaaccgggcgggaaaccgccccataggaacgacaatgcatgttgtaacaggtgttatccgaaaggaaccgtatgtcaaggaaggcagcaacaataacgggccgtggaaaatgtacgccgtagacctgtcggagcgaatgaagatccgcaatcgtgatggccaggacgaaacggtttacacgaactaccgcgccgttttctttgccaaagaaaacatgattaagtggtacgacgaagcactgcaaattgataaggtgattagcgtcacctgccggacgcttcagatcgtgaaccgcgagcacaacggcacaatttacagccacaacgaaatgattatgccgcaactcgaattcagccagcgcgaacctgcgcaaagcggcggcggcaatcagcaatccgggtgtggccagcctcaacaacccaatccgcagcaagcgcctaaacctcaaaacggctgggggaatccgggaatggatttcgatgatgatatcccattctgatttaacaactaaaggagccgaaaagctcctttttttttctgtgcattgatgctattatctgcgttactcaatcaaccaaagaggactaaatgcatggcactatacagagaaggcaaagcggctatgtccgcagacggaacagttactggcactggcacaaagtggcaatcatcgctttcgctgattcgccctggagcgacaattatgtttttgtcgtcaccaattcaaatggccgtagtaaacaaggttgtcagcgatactgaaattaaagcaattaccacaaacggcgctgtcgtagcgtctagtgattatgcgatactattaagtgactcactaaccgttgacggcctggctcaagatgttgcggaaactcttcgctattatcagtcacaggaaacggtaattgcggatgcagtcgagttctttaaggagttcgatttcgaatcgttgcaaaatcttgccaaccaaattaaggcagactccgaagctgcggaatcaagcgctgcggctgcggctgcgtctgaaagtaaggcaaaaacttcagaggttgcagcagagactgctagagaccaagtgcagcaaattatcaatgatgctggcgaacagtcaacgcttgtagttttggcacagcctgacggatatatgaaaattggtaattttttctcaggtgaagggccagagagcgttggagatgttaacctgtcagtatgggagcgtatatttaagcgtggtgaatttgaaattcaccagatgccaggcgacccggcaggcgttgccggaatagtattcggcgggccgaataataaagctgccttagtcttagacgagcgcggacgcattcagacatatgcaattgttgacgggaggttatcagctgctcaaatttcaacaccaatagtgcagggcactggatattttcataatggatttgaagataaaattgttcgcttcccctctgctggaaatgaatctgatgacctaagcccaggttttcttattaccactaacgataatggtattatcgatattttcgtttttagccccaaccagtttaacgaccttggataccctactggctcatctatcgataagcagatgttcaagctggtaaaaagtttcgacatcggcacatcattgcaacgaacgattgaccaatgccctacagttgaaaatttatcaccagttctttatcgcttgtttgatgttaactactcggggtatgggtcaaaagtggtctctggtattctgtcggtaggcaactatgttaactacacgccaaatgtttacatggtcacgtttaacccgcaagccctcaataacgccccgtccattgaccaaggcagtatctatcaatggctgaaagttaccgcgctgcatggcggccaatctggctggggggattctgcattaacgccagcggtaggattggttaatgaccaaaataactcagtagcgaaactattcctgcgacttccgtcgtatgggcaaaaaatatcattcaccccgattaatgttgctgaccccaatgtggtgactttttaccataatgacttacggaataatgtaacggtagatactccaaactatctggtttattcgttcgcagagaaaatggcgacagatcgtttttacgtgaaaatgaataacggtgatgttcggtactctccaggaactgtagttcgcgtttccgggaatgtgactaaccgactatctgataaattatcagacggggtttttgcgataggtggtgaatatcatctggcgaataaaggaaatgaagcgagaattgctgtcaccaacccatcaacaggtcagtacgttatcagcggatgcaatttacgtggagaccactggaaggtttgccctcccgttggtttctcaggaacctcgttcggaacacctccgtacatagttaacatcgtatctcagggcacgaataccttcactatcgaagttagaacgagcgccgggacactggcaaacattaacggtttcgattggctcgatctgcacgttcaaccagcttaacaggagctaaaaatgcaatacttatatgtagacccttctgatgatgaaaataaaccaattccatcagcgtttaaaactgttactgctgctattgcagcaatcaccagctacccattttcaattctaatcaggcgcggcacagtgttgaaggaggccgttaatgccaggttagtgaacacgtcgtctgaaatgagtttttttgacacatacggggatggcccgccgccaaaatggctatccatctcaaattctgcggggcaactagcatcgtggaatgcccgtcgcgttacggtgcggaacatccattttatggacagagatgacgggtttacctcagcagcaaccagtgttaacctgcaatgcactggtgatgcagatggggttgctgatgttcatgtgaaaaactgttatttcacaggtaatgcatactctgtaagcaatccgaataaaaacacgattgggaggcacgttcagctttttggtgtcggttatggtgcagatatttctaatcccgcacataaaatgactgtagaagactgcatgtttaatatggttaacgccggtgtctatatccgtggcaatacctgggtatctgataccactgataaccgtggggatgccgcccgtacttacggagcaaaggttttacgctgctcgtttacaaatattgtacaggagggggcattaattcacacttgtgccagtaagaacgacgcctatacggacaacgagtggcagagctgcgttcgtgactgctactacagttcgtaccgttgggataaatttactactgggggagtgtcggcgtatgacgcacctttctggatgtggcattgtaatcgggttatgtttgaaaaactggaggtgcatggctcctatccaatggcacctgacaacatggcggttgatattgacggtatgtgttgggataacgttgtcagatacgtttactccactggctgcgcccgtacagtgatgtttgtctctgctgataacgcagggctacaggcagctccacctgccgggatgagcaactttgagttttattacacacgtcggcaggggagtggtaataacgtagtggaatactgtttcgcgttcaacgatggaattcagaggctgcaggggcagattgggaatccgacaaacgacgcatgttccatatctcaccaccgcaaccagttcaataataccgtccgtaattgtgtgtttattgacacgtcaagcgtcaagcagcgtcgcctgatatcaacaaatgggtacgacactgagagtgcatctgttccgtcgctgactgtggagagttgcattttctactgcaagtggatgaagggttcagatatcattgcacaactgtcaacgggaaccagaacaattgcgccagcgtctcaagttatcctcaaaaataacattatctggtctgacgcatggagcacagcccctgatctgagcgcactgacaaccctaatcggcaacatatgggagaaaccgcaatatgcgctgttgcctccaagcccaccatcaaccaggcgtggggcaattaaccttggcattccagagaatgcaaaaggtgctggcatacctaacctgctgctcgatatcaatgggcgttcaggcaataacattggctggttacagtaatgtaatcactaaaaattcattattagacgcgacaagaggatacactaaatggcatttgctacgcttcacaccatctacggtctgcaaagactaactcatgtagaaacaatctgagtttacaaaaacaacatcaactttgttgcgatatgacatatcaagcatatcaagacaacaaaagaaaaaaggggccattcggccccttttttacatctatgattcatattaaaagaaagcgcccagccgggcgcttttgtcactagactactattctatttccttttctgtatgccgatatgtatgccctctctctgataaaaccagtgttatatatgactccatcagacgtttcttgtccagtggttccattatctctctcaacccatggagtgaatgtttttatgctgctacccctcctgctttgagttaccctaacgatgatcctattctcttgccctcttccagccgctggtaaatcgaagccacgtagcgcgtatgctcttgtacctccgtaatttccagtgtctatactgtagaattctatttcccccttccctggagtctgaacaattactctaaaagtattcctgaatgtagaattcacttgtataatcaggttcgtatcgatgctcctatcaaagttttctccatgaattttcagtatttcataatctccgctatcaatatctgaatatgtcttgaatggtatcgtgtttgactctgcgatcaccacgtcaccttcaatatgctctgcataaacagtacccttaaaccaaccgtcagtagcgtaaattgtccccctcactgttacctcatttaactcagaggttccgtttttgtctattgaccatcctcgactacctgaaacatagttgtttgactgaatgacgttaccgatcttcgcgttggtaatcgaaccgtcctgaataagcgcgttattcatgaaaacctggtcattctgcacaacaaacggcaacgtgtacgctccagactcagcatttcggatgatagcaaatctatcagcaataaacataacttgcgaaacaacgcttccaccacttgctgtaagctgcatggccatcccggaattatattcctgtccgttgtactttagtccaagtttcattgtatacatggatccaactccattaacgtcagcccatgagtctagtttctgatctagcgctgcggagttctctccaatccttgctgaaagcgcctcttccgacgtaacgcgagcctcagtttcattggctagtgcctcattaacttgagttaatccagcatttaggttttcgttgaattctgccgagatctggttaacctgctgcaccctggcttccgtctcatttgcgatgagaacttctgcatgtttaatttcagctttcctctttccattctcctttttcattattctaacgtccgcatcattcgccagcgcattttgaatgatactgttcgcgtagtcattgagttttgccgcgctatcctgcgtactctcctgaagttctttcatcgcgtcgctgtcgaggatctcatccaggataacatccgtgatagcgttaacgtcagtcgaagacataccgcgagcgtaatcagtccattctgaaacgttgccgatcctgtctacgcttcgagccttatagaagttcacgtagccagctggcaaaattgaatgccagtattcagcagccgggtaaggaatcagtgtaagcaggcttgcgtcctgatcggttccgctttgcgactggtaaagctcaatgtatgccgtgtcttccgccccttctggcatggcccacttaacgcgaatgccgaagatctcgttgtcagatgcaaaaaggttaatcgggccttttggcgctccgactttcccggtcagcgatgcactagccaaagcagaccacggagacgctacattcccgccgccaatgcacctaacgcgggcctgatactcgccagcatagatgccttcaatatcaacctgcgttgtcgcggtgcgcgggacgttgttccagttaccgccatccttgcgccattgcacctcgtacagttttgcatactgcacggcagaccagccgatcaccatcgtttcgacgctcattccctgaacaatgcgagaaaatgagctaatcgttaagtctttcggagcgcccattgaatccgggtcgacaaccgaagttggtcggccatcggtaattaccccattgtcgatcgcgtcatacttgttcggatcgtactgcgtagcagtgatggcaaaggtgaattcgtcgtcatcactacccttttcaatccgggttactacatactgttccgctgcaagctgatcgctctcgatcaggaatacactgtccggcgcaacgtcaaagttatacccaacgtttagcgtgagggtcttaccgtccgccgaaacgctggcgattgtgcggcgcacaggcttgccgtcgtcggtattcaggatcagagtgtcgccagccttcgcgtcgcagcggaacgccaaaaatacctgcgtaccggatacttccatgattcgccctgaaagcaccaggttaaaggcagattgccagtgcggatctgcaacgtaaatcacatcgccgcaagaaggaatcataccttccagaccagtagaaaacgaaacggttgtggcgcttaggttcgtttgcagaatccaacgcccacggcggttcgcctccgtccttctggtgcatccgatcgctgtaatgctggtcgggttgtgtccgaaccgcatggctgcgtccgggttgaatactggttcaacatcctgctcgtactggttttcttcgtcgtcgaacatgacgttgcacgacgtgtacatcgtcttttcgcttgggaacgtccgaacgaaaacgccgtcaacgacgttatcagccgtaaacaggtacaccggatcgcgcggcttatcgacgataatcgataggctttcaccgttgtagaacgtcattccacggaacgcggaacaaatatcccttaccaactggaacgcctcaacctgcgactgaacaattacatccatcaaatagcgcggttccatcccgccgcgattatcaggaacaagttcatcacagtattgcgccacctcatacagcgaccacttgtcaaccgggatgccaagttcgcgctggtctaaaccatagcgctgattcatgatcaggtcataaagcacccatgccgggttattgctccacgcccacttaaaaacaccgtcccacgtcccggagtatgtgcgattaatcggatcgtaattactcggaacctgaataattttccatttctttttgagtgagatggttgggatctggttctggaacagatcgctatcgaactcaacgtaaagcatggccgttaacgggtagcggaattttgcatcaatgacctcagcgtatgattgaacctggaacgcatcgacaaccttcaccccgtcagcgtccggagttactcggctaacacggataagcacctgcgacgtgaagttttgcggaaggttaacgcgaatgctccgatcgtaaccgccagtcgtgttctttccgtcaattttgccagttaggtaggtctgataacttgcgccgtctaccgccatctcgatcttgtactcaacaaccgatccgaccatatcgccgttatctttttgagtcagcacgcgcggccataacaggcgaaagcgaatggcagaaagatttttgttcgatacggtaagcgtataaggcgtgttgtgagtgacttcacgagcaacctggaattcagcgcttgattcgctgaagccctgaatgtagtcctgcgtttgcgtgccggggcggaactctgcaatcacgccctcatagttgaatgttccatcctcgttctgaaccgggacgcctccaaaatgcaactgcttcaggctgaagtcgttaaccacctcgccatccgaaacagcaagcaataacttgatcttatcttttgagatcaggttatctggcatttctacgggagtgcgtggcttgcttgaaccgcccttgcgggccttgatattagtcatcgtttagcctcctgttaatagtatcgcaattgtacacgacaaaaagcccggaggctacgcccccaggctaaaaagcgaatggcttaattagttgttgtcttctgcgtaagatcccgaaccgaacaatgcgcctccagccaatctgtaaccgtatggcaactggattggatacccggccgccgtggtattaatcggcccgccgaacgcatacgatggcttattctcaggcgattcgctcgcccgcatgttgccgcccatctgcggtgcgatcatctgcattacgccacctaaaaccatcgatccgccagccatgaatgctgccgacgaaaaagcgcccatagccgccagcgagccgccgccagtaaagaaggccgcaaccataatcgccgctccgataacgacctgcaacaacccgccgttctttctggcttttgggatcgggatgattctaatctccctcgccacggcaaaagtcgcaaggtcgttcgcgctgattggttttccgtcggcgacaacgccgaagcgcatatttaaaccaaccttgctctgcatgaaaggcttaaacccctcaacctggtaagacagcgcccggatacattcagcaaccgaatcaaccgcaagtttgtggaatactccgaacctacgcccaagggaaccagaaagtttaatcgtctttgtatgtgatgccatgtttaagctccttgtgcctgcaaattaaaaccttgtgctgctcgtaccatccagaatagatatcccggcgagacagcttgccaaacgcgtgatgaaggatgttattgtttccaacgtaaatacccgcgtgattccacttttccgcctgaatctggaagatgatcatatcgccaacttcaggctcgccagtgttttcaatgaatccgtcctcttgccagtaatcctggtaaagattctctttgtattccggcttccaccattcgaacggcaatcgccgatcttttagcgtgacgccgtggcgcttgtgaaaatccatgattaggccatagcaatcgtaagcgcccaaagcccaggggcgaccaatcagaggtcggcgtttcggctcaatgattcgcatatcaccttccgggatggagacgataacccacgacaatccagactcatcgcaaaagcataaatctgtggcactcggaatcgtggtcgccccgtcgccagtatgggaatgaacgaaggcgatcggctccccctccattgacgccatcgcatactgcgtttcgtccggcattgattcgttctcaggatcttgagaaacattgtctagtcggtgatatttttgcacgcgtgatttttgcgttaccagcccggcgcattcgtgcgggtagacttccttcgcgtgctgcatgatctgcattttaattttcggagtcaacatattagctaccactcttcaaagttgctgtcgcacaaccgccgaaactcaacggttcattgccaaaacgaagcctgcaagaagacaccaggccaccgcaaacatcccgcgacgggtcgtcaaccctgtttcctaacttgtcgaagtatccgttctgcccgttgtagtcgcagcccttgccggatttataccagccgcgctgcgcccaatagcaaacggtttgcgtcagtcgggccgggatcatcaatccgtccatatcaaacacggatgttaattcgaacgttgccttttgcgggtctacttgctttggtcgctcgatgtagtaaacaaatcgcctaaaatcgccctctttaacactgccgtcgttttgcagcaattcattgaccaaaacccataccgtaactttggcttgcatgaggccgttgtaggcgcgaataagagcactcgcctgcgcatcaatattgctaaccgtcaacgttggcttttccactgtgccatcgctcgacattgcgatcccgcccaggccgaacgggcgcgggccgtattgctcgccgcgaaacgtgatcatttttggctgaagcgtcccgccgttcaccgccgctaaaagctcctcggttgtataggcgacgttctcgttatggaatcggtagacctgcccgccgaactttgtggcgtcgatatcgatcagcgtcaggatctcgccggggaaaagtttttgtaagcagttcgtaaactcttttgaaatgttggctgtcatcgtaagccctcctctaattgactccagatcataggccaaaaaaaagcacccgtaaagggcgcttttgattatccggctgaagtgaagcgttcggcgaactccgcagttacctcaaacacgccgccaccatgcggcgcaaggttaacggagtcggcagttacgacgaatacgcccattcttccatcaggtgccttccacacaaacggcttggttacgtgatcctgacagaagttataaacctcctcccaatctgaaccgccataaacgatcggaaccgtccggcgcttggtgttaatgccgctcgacgccgtttggatatagccgtttccgaaactgatcgatcgaatgttgttggagacggctacctttgccgcccctccttgaatttgtgtacaccatttaaaggaatccactactaccccctcgttttctcattgacgaacttcgcaatgcgcccgttttggctcaaagcctcggtgaacatatcgttcacgatctgccttacgccctgctccatccccttactatcctgaccggaacccatcgtaatgttaatgtcaccgatagtgaacaccatagccgccgacgctgcgacgttgccgccgttggtgattccagatccggaacttgcgttaccaccaaccaggccgccacttgcatagccgcgcatgagtcggtacaggttttccgggcctaacctttgcgtagcctccttcgtgaatacgaattccccgccgtgaacaacgccttttggttcatacttcccgccgtcgccagtgtagccaccaccagaaaatcccttgctgaacatgttggcgaagctgaacgtgccgccaccaccaaacgcggcagaaagcgagttaaacagcgccatcttgataagcatgttggtaatgtcagtgatcacgctctttgcaaagtcgctaaagctggctttaccagtcattacaaaatcagtcagcacgctcgccatgccgttaaatgtgtttttagtgatatccccgatgttggtgtatacgtcattaacttcgtcgccaatatcagcccacgcatgagtgaacccggccttccagttcatcatttgcgcatcttgctgtgcgtagaatttatcgcttgcggcctgcatcgctttaaatccagggtcacttaaagatccgccgttgtttttccagtcagccgccatttgcgcattggcccggtatctctcctgctccttgctacccattccggcggtatcctgtagcgctttggttttctccgccatctggttttgatacttggtcgacttgtcaagcaaggcgttcaatctctgctgctgaacaatctgatctcccacgatggccttttgctccgccatgtacaggatattctttttgttcgccagcatctgctgttcgctttgggtcagttttcgcttctggcttgcctcttccaaaacctggaatttagcaaccgtctcgaagtagtctttgcgctgctggctgatcttgtcatcaagccctttgtgctgctgcaaaacctttaactgcgcctgtagcgatagcagttcagcctgatactgctcatcaattttaacgcccgcgtctacctgctgcttcctggcgttgcggtttttcaggatatctttttcttcctgatttacgcgatccttcgttttgctgctgtacccaccggaaagggttttatccttcgcggcgtcaatgtaacccatctcgccttttgcgatccttgcctgctgttccgcaatggtttttgcaagctcggcggatttggctttcgagtccttgattaactgctcctgctgcgccagaaagtcattcccaaagtctcccatgccggggatcttctgtagctgtcggccagcgtcaacgatgaactgcgcgatcatggcgtcgccgtcggcaatcagctttctgatcgtgttgatgattgcggaaaccgtgtcaacgataaggtttagcgcccctaccgtgtgatcgcctacccacttccacgagtcagccgcccattttttaatatccatccacatcgtttcgagtggcgttgcactgtccgcgatatctttaaggcgcttatccatagtatcagcaaacagttttgtcgccgcatctgctgctgccgtctcgccttttgttttacgcaaagattcgatgtaggttagctggccctctttcagaaaattaaaacgctcattgagatcggcaagccccttaacagggtcttttacgatggcatcaaaataccctgtgatcgtcttctcgctctcccccgtctgcgccgaccattccgccgtagtcttcgtgatctgcttaatctggttgatggtgtacttaccagaactggcgagcgatgttgcgatttcctgaatgctgccaatcgtggccgatgagtttttgttaatctcttcggttaaggctgtgatctgcccggttgtggtcgcagcatagccaccagtcagcaccagcgcattcgccagttctcgttgcgcactccaggagtcataaccagctttagcgattgccgccagggcgatacccaacgacgcagcaccaaccgttagcgggttgatgtagctcaacaacaccttaaacgtattgctcaagcctccgaagctgtccttgatttgcccgccctgctgcaccgcaaccagccagactggcatacctgacgcaagggaagttacaatatccgtgatctgcatcggtaactggcgcatggccattttatattgcccggcagaaatgccagccaggcccatagcgttttgctgtttctttaacgcctgctcttgctgtttcagcgcgttaatgaacggggccgcttctgccgatacgcccaattgcgccgccttcatttccagcagttcggcgcgtgtttttccgatggagtcagcctgctgtttcaggctggcgacaaaatcacgcccggcatttgccgccttctgctttgcctccgcctctgcgattgctgcgcgaccttcttcggttagcgccgcctgctgccgccgtagattgttggttgtggattcaatgatggctcccaggcggaaaaattccttgtcaggaacaagcccaagcgcccacgctttatcaagttcttccgtcgctttgcgcaagttggccatttttgtgatcgtgggatcgatggcgcttgcgatcctgctaaagctggtttttgatttgtcagtctcttgcttctggcgctgcaatgcgcggttcatttcctcggtctgcgccgtggcccgcctttcagcgtcagcaagtgactgtaggccagcgcccgtttgctggctttggtttttcagttctgcgagtgatcgtaccgctttatcaacctgcgacacgtcaacgccaaacgttagcccagctactttatcagccatgtttcgcccccatatgaaaaaagcgccagtaggcgcttatttggatttcttgtaaatctccttcaggtattcaccctcaaggatttgcaagtcaagtaatgccgcttctcgattgtcgattttatacaattcgaacagcataggcaacgtattatagtcaagccccgtcgggccattcatcccgattcgccactgcgtttgcatggcctggaatagctgccagctttgggcggtctgttcatcaaagtagatcgtttcaagatctgcttcataatccgatcgccttaacccgtactccgcaagctggcgatcggttagctcaggctgaagcgtgagataaacagcccgccttaaacttttgcacggtggcccgccagcgcggccatgtaagtttgtggcagtgccatgacgaacgccgggaagtgagcgcaaagccaggaaatgttttcatcgctgaattcgtcatccagatcccaaccttcagccatgaagcggataaactcggcgttaccctttggcgctttatcttcgctctcataaaagtctttcatctcatcggttgaacgatgttttactgtcatggtgatggttgcttctttgccgtcggggcaagtgaaggttacaggcagcttgaaagaagggagattgccgccgatttgaattttgaatttagccattttgttaactcctgattggtttgtgttattcgctattatgcacaaaaaaaggcgaggcacaagccccgccatttaattacacggcaaccggaaggaagacgtgagcacctttaagcgcaatgttaagcgttaccgtttccatctcgttaacagccgtggaaggaatgtcatcgaaagatgcaattccagaccagtaacgaacctcggaagctcgcgggatatacatgtacatcgctctcgcctgcttgctggcgtcggctgaacgcaacacagggtagatcgcgttactgtaatcgtgcgcaaacgtgtagttaagcgtcactgccgacttgtaagtaggttcggattgttcgcgctcatcgctcaagcactgatagttatagaactgctgttcgttgccatctttgcctaaatcctgaatgcaaggcaattccacccaatcagtgatcacgcttacgttaccagtagccgcgccgccaggatacttgttagtgtcggaggtgtcgaactcttccagcgttgccacgcctgctgtcactgcttttacgcgagccaccttgttaacgaagtcgtcccaggtgcaatcggtgaagatcacaatatctttcaccttcagcttgccatctgccaccgtgatttttgggtttttcgcgtcgttggtcattgcggtaaacggaatcttcgcaccgcgagccttctcaaagaagaccttagcaccgtttggtaaatgcatgttgaatactcctgtttgaatgaaagttttacaccgccattatgcctacatatttccaggctggcaagaaattataagcgacgtgaggttccgctagttggatggatagccgctctcctccgtgcggtcgcatcttactgtgaaccgaaccgggaagaaccaacccgtttcgtgcttctgcacgccgtgtacctccgcccactcgctcacatataacttaccgtcacgatcaacaatctttccttcagggaaggattttgcaacgcgttgggcgataatcctcgctcgatcggttccgattccaggcttaaagataacgtcaatctgaaccatcgccagatagactcggcatttccttgacaggtcaaccgatcttgaatccgcctcgacgtaggagactttaaggtaggtttccccgcctctcggtgggataaagtcaacgttatcccccgcgaccctcaacccgttctcggcggcaaatttagccactgccgccttgcattttaacgccatatcataatgcatttttcgccctcgctcgcttgattgcctcagtaacataaacgcccaaccggatcgcaacaacgcccataacgccattgggagcctgctttgaatggccgtattccagcgcgttcgcatagattagcatgttactgaaccagatcgaagtgatcccggccccttttgcgtatagtgcaatgttggctttgccgttctggattgtcttttcgccagtttggtcgtatgcgttaatcgcgtaaagcggggcgcggttaaaggtgatttgccagttaccacggaagcgccctgtatcaaccggagaacgcattacaaggtcgcggtgaatatcttcacacgtaaaccttacaacgtcctccagcgcatcaccagcggccttacaccacgcatcaattgcgcctgtgaattcgcggatagtgtaattagccataagtcgccaccctgcgcaaaactggacggtaggcaacgacggttcccgttggttttaccgggcgggcattaaccacgcggtagcgctctccgtctacttcgatttcgtcaccttccatgattggcacatcatgagtgaaaaaaccgcgcttatcgccagcaaggatggtttcgccgttaatgtcacggtcattaacatccctgatcgctcccttgattgtcgtcaccacctcgccaggaatgatatcttccccggtttccggatcgattcctccgccagcgcctttcgtgtacttgttgaacacgccgccagcgtcgctgaagaatttaatgccagcgcttgcgcgtgcctggattgctttgtagttcatagcgatcacctaaccattccgcagcggcgcacgttcccggcggtaagcaggccgaagccgccgccgcgcatcttgagcatacgccagtacattttgccccacggcgtagaaagcatttcgttatcacttgacgccgacacgcgatcgaaggtttgggaaaactccccggtcagggtgaacgacgccactcgctgcgtgtaagattccaggctttcgccttcctgcttcattgcgccgtccaaaaacattagatgcatggtcatcaacgcgatcgccgtaacgatggagtctccgaaccgggatttgcaaacgaattcttcggcaagcacaacccatgcagacagcagttcatctggaacttctttaagcggaggtgcaaggctgcgcattttatcgatcacatcttgaattgtgtaattcatggttgctctcctgatatgaaaaaggacgccgaagcgccctttgttggtttttgttattccgcgcttttaggctgcacgatctctttcgctgtcgcctttaccgctgcgatgtattcgcgcgtgcgtttaggattgtcgtagaactcgacgcggcctttgaagatttcgtggcggaatcggtcgatctcgctttctggcacttcgaaaacctgctcatagacgtaatttgtgcctttatagcgaattgcacatgcaccaacgttttgcagttgaacaacctgcggcgtctgttcttcgctggtgatttctgcggtttctacggtttctacggtttcttttttactggccattgttaatgctccattggtttactttaggtttcaaattaaagcacattgcagaatgcaatgcaataaaaaagcgcccgaaggcgcttttgattaaatcccggtgagaatcgcaatagtcagcgggcggtacacgatgagaccagtgcatttggaggtgcacggaactttgaaatgcaggtctttcggctgcatcggcagcatgttgaaccgctcagggatctcgatgctcatgttcattgggtctttttcgtatgccagcacgcctttggtgcctgcgccgtcaatatcttccaactccgccatcgccgtaatggtgatgttcgggtggttcttggtgaaccaagtcagataagagtcgccgctagtgtccggcatctttttcgtcagaagacgacgcttagacggaggaatcacgatgttggtcgcgtgatggcggcccagcgtggtttcttcgatcatgttaagcaggtcttccagatcttcgaatgccttttcagccgccgctgaatcattgccccatgcagcactggcggtcatgcggttaatgttcggctggtcgaaaatgctcacgataccgtgaggagtggagcctttgaacaccagatcgtttacgagcgtctcatgaccttcgcgggccagggttgcttttcgatcgctcaggcttgaacccagcgctgcaccagttttaatttcgtcgatggaaataaaccacgcgttacccaggcggaaaactttccctgacttctcttttgccatcgcttcaacggtcggcagatcgtcggtgtaatcggcgatgattttcgcagaggttacgccgtcgaattcgagccactcaaagcggcgggcggtcggcgagatctcggtagttaccgggaaaagctcaagtgcgctggtctgcgggtatgcctgctcatactggcgattcagtaattgagtcatctgcttaacagtccagataccgtaagcatccagttttgcggcatcgacgcccatgccctgcattgcgaccttaattgcactctgttcgaatgcatctaatttcatagtcatctgaaaaactcctgtttgtgtatttggcttaacgagatgaagaatatcacgaatcgttaagccgtcaaaggtttttttctggtgcaaaaatggggccgaagccccttattttatacgccagcgccgccagttgcagccgctggagcaacggcgccctgaagcacctgcactttcaccagaacggtgccatctgcgttcttggtgtattcgccagtgtgtttgtagccagttttgataaccccggcatcacccttcgctacggtgccgtttgcggtaaaggtggcgaaagaatcaaacacgcaatctgcttcagtaacagttgcgtccgcgatcgcccaaatgcggccatgagtcataacgttaaccgcgctctcatcgtcatacttgccttcaggcgagtaggcttgcgagaactgcgcgatgcctacaatgacgtcgctcgctgctttcgctggcttaacgaccttatggccattggaaactacgccagtggaagccaccagtacgccagccttgatatcgccttcagcaacgcaagtgccgtcgatattataaagcgacgtatcagcgatctgccccgctacggcaatatcacgcttgcgggaataagaagctggaatctgtgccattttgaatctcctgtttatttggtctggtagcggcccgaaggccgcaaattattagcggcggaattttgcctgcggatcgatgatttcggtgccgtcaagtttcggtaagccgcctttgtctttttgctcgccatcttcttttttgccgaagactttggagcgattgccagccatcttatcagagttggcgataaagtcaaaagaagcgtcgatgtacgaatcttctttatcagacagatcacgaccgtcaacctctttgatgtaagcaactttcattgccttaacatccaggccgtcacacttgacgccagcggcagaaacaaccgcgataactttctgctttgcgtcttcgtcggctttgattttagcaacgcgggcggcgacttcatcttcaatgccatcaactttggtctgaagtgcgtcacgctctgcggtgatgctcgttacctgactggttgccgatgcaacttgcgcgtcgagttttgcaatgtaagcgccaacgttatctgctacttcaacatctacgccgtcaattttaatgatcattgttttagctcctttgtggtttgagtcgtcatcataggggaattcttgttcgctatcaagatttaatttcgcaatcccggcacgcccacggaaaacgagcgctacgtggttcacgcgaatcttcgtctgcactgcatcaaagcgaacccaatcagagacggaatcatttttcatctcttcgaagttttccggaaggtcttcatcgaaataatattcgccagttgcgttattaccccaacctttgcgatcgatatcgaccgaagtgtagcccactgataactcagcagctacgcgctttttggcttgctcgattgactcgccgtcgtaaatcatcaccggaacaagaacaccaatcccatcttctttgccagcgccggagcacgagccaacgacaaggccttttgcgttctgcgcgttcaccatcttgtgacccaaagtgatcggcttgccctggtatgaagccagcgattcagcatcgaacacctccgaacgcgggcggaactcgacgcgctgcccggttggcgtctggtacgtctgcgcaccgatacgcgccacgatcggagtatcaaccagaaagccgttctcatcgaatctggccttcatctttaccgtgtcgaacctttgaactcttttcattttttatctccgtgatttttatggaaattgtattttgcctctgccgcctttcttgctgaaatggcttcgtttttgtcttcgtatctacctaagaatcgctcttttttatcaacccttatggatgcaaaccatttacctgttctcttgcaccaactcacgcctacaactccactcttatttgttacgctcattgatacgtttttacagttttcctttctggttacaagccttaaattctcgatcctgttatcgtccgttacatggttaatatgatcgatttccattccttctggtattgggccgtggtgcatttcccaaatgatccggtgagcttgtcgcagtttgcccatgaatctaatgtatacatacccatgctcatctttccacccggcaacatcaccaacttttacgcggtttgatgttgctcgcttccatatcagatcctttcctacgtgattaaagtaatcattaaagttaaccatcaatcatcctcattatcaaatgacggaaccgcccagcacctgcaaccgtattcttcgccggggaagattccgtcaccattaacggggcgtcgcttaccttctagcttgatatggctctcgcgctcgcggtcgtccatcatcccgaaccaaaagtaatgcgatactttagcatcttttaggcgctgcatcatcaacatactgttaaaagttccgatgattccgcttgcccggttgcgcgaccaactaccatagatagcgtatcgaccttcgatgatttcatcgatctgcttgcgagacttgccaatgttgttggcggttctaactttcgttgtccagtcagcaactatatcgcttgctaacttcctgattgacgcttcggcgtaatcctgccacttatttagcgattcctgataccagtcttcatacccaccagcaccgaattctttaaggcgcataactgattcgttgttccgcccgccagccgcgatcgcaattgcaagccactgtttagaattgaatctatagatagtcaacccaatggaggaaagcgccgcaattacggcggaaaagaacacgatggcagattcgctgatatcgtcttccgcctggctgatttcctcagccgtggcgtcaaatttaaggcggtctaagcgatcccgcatttctaccacgagttctgtcaccgcgtcctgcattgagcgggataactcccgctcgcttgcttcaggataacgccagtttgggattctgccgttaactttcatcatccgcctccgtgttgtttaagatctctgcgctttgcgtgctgcctgaaccagcggcgcgatccggaagttttttctgcttcggagcgttgccttttagcttcagttcaggaatcaacgccgacagagtatcacgcgcttcgttggcgtcaataacctggtcggtaacgaggctgcgagccgcgttggcgttcttctggaagatatccgctttctccgcatcggtaggcagcgacaacggttcgaactcgacgctgtattcatcctccgttacgatgaactgtaacaggaattctaacagcggcttgtaatcgtcattgcgcttgcggtcaaccagtttgtagaacgtctgtagcgccgtgttctggcttgcacttacgccaccagtgtttttgttttttagcacgatctcgtgaatgcctgacagggcgacaatccgatccattttcgcggaaaggaattccgggatgcctgaaatatcggagttgataacggtgtactcttcgtcgtccgcatcaataccgatcgtgtttccgacgccggaattagcatcaacctgcgccatgcgcaaccgggcggcgtactcgccttctttgtcgtcgcagattagcgccaggcctttcgccttccaaacgccctgctgcttgcgcttcagtagttgcgtcgccagatattccgaatagtcgtaatcaagaatcgcttcaataatcgacttgttcagcaccgagccaccagcgccattatttagcttgcgcaccttgttggttacgcgctcgccgtcgatgtagtgcatacgggtataatgcaccttgaacggttgcccgccgtttagcggcttcacctcgtacattttaggctttccgaatcgtgggcttcgcggactggtttcctcctctgcgacggaaacggaatcatggtcgtaaacaacgatagattcgagtggcttaccccgcttcgctgccgaagtcaatgcgcgaccatcgttaaccatcgccaggacgtaggagccaccatacagcctagcccagcaaagagcatcggtgatttgcggctccagatttaacccgtcccattcagattgaaacttggtgttatctgaaatgccgtttagctggaagccgggagcgaccatctcttccgggatcacgtcaacgattttcttcgccatgccgttttcatgatagaactcttcaacctgcgacattgttccaaatcttgccgcgatagacgcgagggttgacgcataaccagcgccaccattaaagatttgattatagtcgtccatcttaatgttattcatatttcaaccttgtttaagtgtgggccgtcaggcccacattatgtattagcgacccagctttttcaatcccgcaaggcgtttcattcgctctaccggatcgtcgctcaggttcatttccaggtttgcggcgtcaaacacgttgtcgcaaatatcatcgtgtggatgagaatcgtcatatgtaaacgcgctcatctccgcctcaagctctgcaacgaatgggtgattgtccggcagcacgacacgcccacccttgatgattggttgtgcatccatagcgcgagtgaccttatctttatcgcgctgcaccgggacgatctcgcccatgccgtttaccgccttcgttaaatcctggattagacctgtaccgctcgccttgtcttcgatgtagatccggcgaaggtttccgcactccttgttccgacgccagcactgcttgatgaatgcttcggcctgaacgcggagatctggcgcttcccattttccgcgaattccgtcaatgaagtagacgcgatcccgatacttgccccaatagcacattacagagtagtcgtttagctccttgaccttctgcgcggtgtccgccgtgatgaacgtatattcgaacttgtccgggcgcggctcgtgcgccttgtcggaatcgccgtaatagcgccaccactccgacttgaacacgttgccacccagggcgatcggttcctgctgatactgcgaaaggaacgtataaagatcggcttcgcgtagcgcaaccaggttctcgatcgattcgttttcctcccaaaatgaccagtattccacgccgtcaattaccaccgacgggccggaaagcacgtcgcgctcgaactcaggtcgcaaccagtcagggagtgattcgccatattcccgcgttaccatcgccgggataacaatccgatcgaagtcgatggccatgccgccgctcatcatgaaccaggtggaatcctgcgcgtgcaatcgctgctgcacggaaaggatcggcgtttcgtctcctttcttcttcttcgctcgacgggatcgaatggtgttcttcaggagtacgtggtttttctcacgcttcaccttcgagaacatatcatccggtttgtcgatatcatccagcgcgataaggccgctgaaacctggcgtcatgtacccgccacgcttaccgacgatctgaccgccggacgaacgggagaccatttccagccttacgcggtcgttatcgtccatgacctgaaattcatcgatctgcttgcgcccgaactttgatggccatagctcctgccactcgttagatgagaagatcttaatcacgcgatcggagttgccttttgacagcgcgtcaccctgcgagatctgaaggtttcgaaccttccggcatttaagatacgcatacggcgcgaggtggattgagaacgcctccgtctttgtggagcctggcgcaacgttaacgatcgtgctcttgcgcttcccggcgataatttcatcaaccgtgtggcaaaagtaggagtgatgccagttccacatcagcttttctccctggatgatctgaaaccagatcttcatgaatagcgaaaagttgcgcgtactaagcgccttaattgccagcttatcggctggcgacaggtcttcccaaatgatcatttcgttcatatctgacccttacagcttatcaagaatattggtcactgccttctctaacctctcttcggtgatctcgttcttatccccggcgatagcgtcgatgttcagcactggtggcttatcgatccccatctcttttccgacgaaagaagcgttaatcatgccgacggcagcaagctgaaatttctgctcatagatcacggagtcgatgaactccatgacgggagcatagttaggatcgtggcgatagcgtgtaagcgttgactggttcacgccgcaaaacaggcttaaccctgttagcgtaaaaattcgaggcttgttcactccccactcgttaacgtcgccctgaaacgttgccgtctccgcagccttgattgcgttatcttcggcccactggaagtaacgctttgcgatatcaaaaaattgttccggcgtcatctctgccgtgcgccctagcaccacgccgaactccttttcatatagcgctttaaagttgcctgcaaagtgcgatttcgttacgcgttttctacgttcttcagacatttgtaatcctccttctgtgttgatttgcgagtatatcagatcgcgggcataaaaaaacccgccgaagcgggttcttttgtcatatcagtttgtttcgccgattcagcgtcttctgtagtttcacaaatagctcacagtcaacatacggaagcggcgaaaaagcaattcgttttgcgataccatccggatcgccaattttttcccaacgtgccgttttcttattgtacatcatggcagcaaaggtgccttcatgtacccgctttgaaagtcgctctacaaggtgagccgctccgacgtgataacctataaaaagcattaaaagagcaataatcacagttagcatcatctgatttcccttatgtagttgatgttgattttatgcgtatccagatttacgccggattgcttttttgctttctctaccgcgtcggcggtgtcgttcgcctcaatagtcatgctgaactcttgaatgcaggatttgcaaaagccacccatttttcttgctgtgagcatgattttatattgcatcataactcctatgtaaacgcccctaaccggggccaggcttgcggatgtttaccgcctcttgtgtctacatggttcacgttacccgatcagcgcgattgcgtcaataggtcactgaatcgtttggctgttttttattcatactcgccatcccttcgaccgaatcggccttccaggtagccagctatccatataaactggccgcgagtaaccagcgtgttgatttgcgcccaatgtttatcgatcatcttcgcggcgacctgatcgtaggtcttcttgtccttcttgatggcgtcttttgtttctgcggccatctgctttgctatgcgctttacggcgttgtactgcgcttcattcagtccgaacatttggccttctcccattctacccaggttccgcgagcgatgaatacttcaacccgcagcggactattgaaatttttgtagatgaagatgaacccttttctgctgtccgtctccacctgcgtaaccgggaacgccagcggcttgatggcgtcgtccgactcgctcatgcggataccagtaattgttgcaccaatcggcatatcttcgactttcgagtattcaggcatacaatcgtactccttaaatttgcgccagccagaatggcttacaggcgctttaaacggcattcgatttcgttaattttttacgtggtggcaaggctcgccatctttgacctcgccccacgcccggcgcttgttccgttccagcttttccgccaccgcttcagccaactgctcatcgctgaatccggcgcggcgcgttgcgtcccataccagcatgaggatatcagcgaactcgctaatgtcatccggcgcttcggcggcctcgatcgcctctttcgccaggtgtttgagcggcccgactggcccaacgtcgccgaactggcgatccgaccactccgcgtgctgcgaccgaacattggtgaactggtcggccttcacttccggctccgcccgcaggcattgaaagtcgctccacgtcttcgggttgttctgcaattcacgcaggctcgctaaagcgccgttgatatccatgccttccggccagttcaccttgaacgcttcaggcttgcggagatactcgacaagttcgccaccaagaacggtttgctgcctaatcgcccgctctttggtgtcgcagatgaggcggcgcgatttgcgcccctcgttggttccaatggtgtaagtcagtacccaaatttgttgctcattcttccacaacctcgcattcgtctgcgcttacgctgatattgtcaccagcctggataaactcgctattgcgcggagcgatcacacagtatgagccgtcgttgaagtggccgtcgacctcaagaacttcgccgattttgaggccgcattcttccagggtaattgagccgtcgccgttaagagtgttgattttggtgattttgattttcattgctgtaactccgtttcgtttcgatggggtaactataccagcttacccctgatctgttttagcaattcgtgctactgctaaagtttggcgaatgcgtcggccatcatgcgcaaaacccgcgcgtaatcttcaatgtcatggccaggcttgctacgcatgattttgcgaacattctcgatcttgctgtttgcggcctgaagttcaccagtcaggaacgcaacttgcttttcaagctccgcgattcgtgagaacggttcacgcatgaatgattcgcacgacgcatcacttaactccaagccgattccggcgcgaacgacggcatttaacagcgtgtcggcgtcgtctttggcgtgattatcggacgggatcagatcaacgatgcaggcccggctaataaacccgtccccgatggttgcagcgcgaatggcgatagaacggctgtcatcgtaggtgaacgagtcgcgcttactgcaatcttcgatcgggtactcaatatcgaagcgatggccaccaagatagtgcgaagatcttgggtttacgtgatactcgcgcccgtagtcatcgctgaccttgtacagcatttcgccggaacatttggtaaatgcggttgcggtatagcgcttgcctttggtgaatttagcataagtattaaccacggaatcgacggacgggatcaggatgatttttggtttgttcatgggtaatttcctttgttcgttagtgtggggatagtatgcaccatccccggacgttcgttttagcaattcgtgctatcaaagggcgtctaattccgcctcaatgaattcgtaccactcgtggccgttaactggatcgtgttccgtgccatgcagccagtccgtatgcgctgaacaaaattcgccggatttgttgaaataaaagtcggcccatgaccgcgcccaatcacctactccagcgaacgtgccgaacttgcggatgtatgcatcggtgtagccgcgctgcttcgctatgcgcttcagtgcgcgaaccagcaacttgcgctgcgatgccttcgatactttacgcaggtggaaaagcgcgttttccggctcgctaccaacacggatggtcaaatcttcgtcagtatccagcggattgacgataaattcgttaaggtatccgccctgtattacgtgaaagtctccttttgagtcttttacctcgacggcatcgaatacgcagccgataaggtggcgttcacgttcgcgggccgcattgacaaccattagtttgacggttttcattagcggatctccttcacctggtgaacttcgagaaggttggttacttcacggatgccgcagtcttcgaattcctcttcggccccggtagccacccttaacttggtgaaccctgcgtcatcgtcaataatgacttcgataacgtgttcgctagaaagctcgatgtatgcacagccgtaggaattcagttcttccagcagtgcgattaaattatcgttcattgcgttgctcctgattggattgtttcacttcagtaacgccactttatcaaatgacgttacggcagttttaacaaaaagtgctattctttttcgccgctgaatgctgcccgatatccacggcggaacccgttaatctcagacagtcggcatacaccaataatcatgcacagcattccgatcgtctgccagcccacgctgttatgcagggcaaggccagccaggaagaaggcccaatacagcgcgagtttctttttgcttactttcatactttcacctcaaacaaaacgttgttttcgtatggcctattggcgtacatggcgatcttttcgtccggcatgcggcaggctggccaaaattcttcgtcttccgtggtgttctggtcgtcctgcaaaatccacacttcatcaaggccggggccgaacatggcgtcatactcgcggccaggcgtgaaataggtggatagcggcgaatagccagcgtgcgtgcaaattacttttaccgtttccattagtagatcccgttagtccaaacgtaaccgtgttcgattatctcgcgcagcataacccttttctgcgatgggccaaccccgtccccgccagtgtagaaccacgtcccatgcgaaaaatgaacctgctgtgcgaacagtctgccgcgcacatggatgtaaagtcggttgcgcattgccaggcctttaagcgtattgacctgctcgacggggtcgccttttaccttcgagatcttgcacattactggcttttcgccaaattgcccggttaagcagtggcgatcgaagtctgataaacgtatcatccaactacctccatgcaggcatcataaccgaagaggtctgttaccatcttccaggcgtcgtcgtcgctcagtgatttggcgtcgaagttctcgacgtgcttaacgtgcgtccagcagtatgagccatcaacccaatgagaatgggtttgggagttgccgttaaagcgcccgaatctttgaatgctcaggccaacaccgcttgagtggcgcttaaaccacaaaatagccacgttgccaacttcgttgatgtgaataagtctcaccgcgcgaaccccaatcgtggcgtaaaggttattgggtagtggtctggtagtgcgaatcatggtgaatctccgttgtttggtgtgtggccattatgcccgatctgctgaccgggcatttagcaaaaagtgctattcagaaaccgaatgcctcacgctccaggcaagccagcgatgggaagctgaatttcgtcacgtggtatgagtcgccaacgtagccggaaatgctgatattgttgaactcaacctcaacactgataatcttcatgttcttgctgaaggcgtacattgcaagcgcacggtgcgcacgcgccaggaattcgaattgattcatttaaagatcgcccctttgatttttttccagaaagcgaacggtacgcgctttggcttcaactccaccaagtcgtgatcgtagaagcccacgagtaagctgcctgtcttcgtcggtacacccccaaccacatcccccatgaaaaaccaactatcgccatccttaaaatacaggccgccgcacgcaccaggggcggcatgggtagcagtgtccggcaggttgtatgtcttgccgcgagattcaaattgttgcattcttctgtctccttgcataatcggtttgttaatagacttcgtgatgattatgcccgatcccttgaccgggcgtttagcaatgcgtgctatttcaggccgcgaaggtcaatcttcgattctgcccaatcatggaagcgatccatctcccctactgaccgcatcttgttttcggaaggcccacaatccacccaggctttgcgcgagtagtccgggatgcaaacatcctcggcggtcgactcgtaggcccaaatcgagccgtcggcatcaatggcgatcgtgttagcccaaactggcacgtcaagagactgcatatcgttggtgccggggatgttaaactgaaatgctacaacgtggcgctgcgtgatggtggccactacttgttttccagacttaatttcgtgaatcattgcgttctccttacagaaacattccagccaggcgcaggcggttgatgatatcgtcacgcttgacgcggaggccgtcgtaatagtcttcgagttggggatcccatgacggcagttcaagcattgctttcatctcatcgcaggctactttaagcgcgttgaagttctgctcgacggcgcgacggtgggctgctgcgttcagttcgttgttgtggttgccaatcatgttttttgctcctctgtttcgatggggtaataataacgcattgccccgatcgagttttagcaaaaagtgctattcgtgcctattgaactcatgaacctggtttccgccggaatagtcggtaatatccacgtggtcgcaggtcacgtaaaagccgcgaatgacggtgaagcgccacttgccgcaccagtggaagtatacgccgtgctcgctgccctggacggctttggttgatgagtatgggatcggcatcccggcgaaggtgcgaagttttgttgttgctgaaaatcgtggcatggccaatcctcctggtgtaagccgtttttatggttgggatacagcgccaccgaagcggcgctattgtgattatttgccatggcgtgcaaggtggcgttctttgagtttctgccagtgccagcgcatgacgtgttcgttatggtagttgctggttgaatatggattcttcttgctcattttcatctcctctttgttgtcgatgaataaataataccggatctcgacagcagtgttttagcaaaaagtgctatcttccatctcgtgcatatcgccaaccgaaagataataagcgatatcgaggcggctcatggtggggtatggccagccgcattcatgccagataacatcgccctcgcctttagtccacatagtttcgccgtcccaccgccaaaggcggttattgaggcgcgatccgtagaccacgccaggttttacgtcgctcgccttaaaattcataatcaacaaccccgaactcgttaacgatctgcgccttgtaaaagccaccatttgccgccaggttgtaacatgccgctacggtctcgaattcgcgcaccactggctcgctgttttcgtgttcccatgtgataagagtgaccatttcgttttcctcggttcgttgtcgatggaaagacaatacccgatcgctctgaccgggttttaacaaaaagtgctattgcgtggtggccgcttcctggctgatatcgctggcggtcaatccaagatcgatagccgcgaacaagttcgccttgtaaatcccggccagggcatgtccggcaaagtctacagcaagagcggccactaaacccttaatcctttccctctcggagatagcgccctgccgcctgtatgcctcagcctccatgtttgagccagtcattgcgtcgaactcggtaaagacggagatcaaccccgcccccaggctcacccgcaacacttctcccggctccaggagtttcagcaacggcctgcggaaatggttgtcgaccggatgaacgccgaacttatccgcgaactcctccgccgtcatctggatacgtcgcccgccatccaggaacatgcgccggatctcggacgaacgattaccagtgaatgcggcgggtgacttttcagcaactggccgatcgtctacccctggtgagccgccaaacgtgatggattgcagccattcatggtaagctgcctgcttatctgcgtcgtactgcatccactcggacacgtcgacttcttcgaactcatagcctttatattgcatgtgtttttctccaacatttacgtcgtttttgcttgtgtgggaatgtcatcttaccacccgcaagccttgccgtaaaagggtttaagcgtgtttggtaagatttgctgtcatcccctatatatccctatatacattttttcgcggcggaacatctaaaaactatggcttgcgcaagaggaatccataacctccccgaagaaatcttaccaaacatatatatagataaagagtaataataatattattatttatcatatacttatatatctattataggcttatgttggtcactttttgcgcaatttttaggtaagattattcctcccccacatttccacacgacgtaaatgttggcgaaaaacacctggcgcttttgctggcttcgatcggcaaattgcgtgcatggtgcatacatt

SEQ ID NO: 249 - DNA, 49701 bp, synthetic construct
  source 1..49701: mol_type = other DNA
tgtatgcaccatgcacgcaatttgccgatcgaagccagcaaaagcgccaggtgtttttcgccaacatttacgtcgtgtggaaatgtgggggaggaataatcttacctaaaaattgcgcaaaaagtgaccaacataagcctataatagatatataagtatatgataaataataatattattattattactctttatctatatatatgtttggtaagatttcttcggggaggttatggattcctcttgcgcaagccatagtttttagatgttccgccgcgaaaaaatgtatatagggatatataggggatgacagcaaatcttaccaaacacgcttaaacccttttacggcaaggcttgcgggtggtaagatgacattcccacacaagcaaaaacgacgtaaatgttggagaaaaacacatgcaatataaaggctatgagttcgaagaagtcgacgtgtccgagtggatgcagtacgacgcagataagcaggcagcttaccatgaatggctgcaatccatcacgtttggcggctcaccaggggtagacgatcggccagttgctgaaaagtcacccgccgcattcactggtaatcgttcgtccgagatccggcgcatgttcctggatggcgggcgacgtatccagatgacggcggaggagttcgcggataagttcggcgttcatccggtcgacaaccatttccgcaggccgttgctgaaactcctggagccgggagaagtgttgcgggtgagcctgggggcggggttgatctccgtctttaccgagttcgacgcaatgactggctcaaacatggaggctgaggcatacaggcggcagggcgctatctccgagagggaaaggattaagggtttagtggccgctcttgctgtagactttgccggacatgccctggccgggatttacaaggcgaacttgttcgcggctatcgatcttggattgaccgccagcgatatcagccaggaagcggccaccacgcaatagcactttttgttaaaacccggtcagagcgatcgggtattgtctttccatcgacaacgaaccgaggaaaacgaaatggtcactcttatcacatgggaacacgaaaacagcgagccagtggtgcgcgaattcgagaccgtagcggcatgttacaacctggcggcaaatggtggcttttacaaggcgcagatcgttaacgagttcggggttgttgattatgaattttaaggcgagcgacgtaaaacctggcgtggtctacggatcgcgcctcaataaccgcctttggcggtgggacggcgaaactatgtggactaaaggcgagggcgatgttatctggcatgaatgcggctggccataccccaccatgagccgcctcgatatcgcttattatctttcggttggcgatatgcacgagatggaagatagcactttttgctaaaacactgctgtcgagatccggtattatttattcatcgacaacaaagaggagatgaaaatgagcaagaagaatccatattcaaccagcaactaccataacgaacacgtcatgcgctggcactggcagaaactcaaagaacgccaccttgcacgccatggcaaataatcacaatagcgccgcttcggtggcgctgtatcccaaccataaaaacggcttacaccaggaggattggccatgccacgattttcagcaacaacaaaacttcgcaccttcgccgggatgccgatcccatactcatcaaccaaagccgtccagggcagcgagcacggcgtatacttccactggtgcggcaagtggcgcttcaccgtcattcgcggcttttacgtgacctgcgaccacgtggatattaccgactattccggcggaaaccaggttcatgagttcaataggcacgaatagcactttttgctaaaactcgatcggggcaatgcgttattattaccccatcgaaacagaggagcaaaaaacatgattggcaaccacaacaacgaactgaacgcagcagcccaccgtcgcgccgtcgagcagaacttcaacgcgcttaaagtagcctgcgatgagatgaaagcaatgcttgaactgccgtcatgggatccccaactcgaagactattacgacggcctccgcgtcaagcgtgacgatatcatcaaccgcctgcgcctggctggaatgtttctgtaaggagaacgcaatgattcacgaaattaagtctggaaaacaagtagtggccaccatcacgcagcgccacgttgtagcatttcagtttaacatccccggcaccaacgatatgcagtctcttgacgtgccagtttgggctaacacgatcgccattgatgccgacggctcgatttgggcctacgagtcgaccgccgaggatgtttgcatcccggactactcgcgcaaagcctgggtggattgtgggccttccgaaaacaagatgcggtcagtaggggagatggatcgcttccatgattgggcagaatcgaagattgaccttcgcggcctgaaatagcacgcattgctaaacgcccggtcaagggatcgggcataatcatcacgaagtctattaacaaaccgattatgcaaggagacagaagaatgcaacaatttgaatctcgcggcaagacatacaacctgccggacactgctacccatgccgcccctggtgcgtgcggcggcctgtattttaaggatggcgatagttggtttttcatgggggatgtggttgggggtgtaccgacgaagacaggcagcttactcgtgggcttctacgatcacgacttggtggagttgaagccaaagcgcgtaccgttcgctttctggaaaaaaatcaaaggggcgatctttaaatgaatcaattcgaattcctggcgcgtgcgcaccgtgcgcttgcaatgtacgccttcagcaagaacatgaagattatcagtgttgaggttgagttcaacaatatcagcatttccggctacgttggcgactcataccacgtgacgaaattcagcttcccatcgctggcttgcctggagcgtgaggcattcggtttctgaatagcactttttgctaaatgcccggtcagcagatcgggcataatggccacacaccaaacaacggagattcaccatgattcgcactaccagaccactacccaataacctttacgccacgattggggttcgcgcggtgagacttattcacatcaacgaagttggcaacgtggctattttgtggtttaagcgccactcaagcggtgttggcctgagcattcaaagattcgggcgctttaacggcaactcccaaacccattctcattgggttgatggctcatactgctggacgcacgttaagcacgtcgagaacttcgacgccaaatcactgagcgacgacgacgcctggaagatggtaacagacctcttcggttatgatgcctgcatggaggtagttggatgatacgtttatcagacttcgatcgccactgcttaaccgggcaatttggcgaaaagccagtaatgtgcaagatctcgaaggtaaaaggcgaccccgtcgagcaggtcaatacgcttaaaggcctggcaatgcgcaaccgactttacatccatgtgcgcggcagactgttcgcacagcaggttcatttttcgcatgggacgtggttctacactggcggggacggggttggcccatcgcagaaaagggttatgctgcgcgagataatcgaacacggttacgtttggactaacgggatctactaatggaaacggtaaaagtaatttgcacgcacgctggctattcgccgctatccacctatttcacgcctggccgcgagtatgacgccatgttcggccccggccttgatgaagtgtggattttgcaggacgaccagaacaccacggaagacgaagaattttggccagcctgccgcatgccggacgaaaagatcgccatgtacgccaataggccatacgaaaacaacgttttgtttgaggtgaaagtatgaaagtaagcaaaaagaaactcgcgctgtattgggccttcttcctggctggccttgccctgcataacagcgtgggctggcagacgatcggaatgctgtgcatgattattggtgtatgccgactgtctgagattaacgggttccgccgtggatatcgggcagcattcagcggcgaaaaagaatagcactttttgttaaaactgccgtaacgtcatttgataaagtggcgttactgaagtgaaacaatccaatcaggagcaacgcaatgaacgataatttaatcgcactgctggaagaactgaattcctacggctgtgcatacatcgagctttctagcgaacacgttatcgaagtcattattgacgatgacgcagggttcaccaagttaagggtggctaccggggccgaagaggaattcgaagactgcggcatccgtgaagtaaccaaccttctcgaagttcaccaggtgaaggagatccgctaatgaaaaccgtcaaactaatggttgtcaatgcggcccgcgaacgtgaacgccaccttatcggctgcgtattcgatgccgtcgaggtaaaagactcaaaaggagactttcacgtaatacagggcggataccttaacgaatttatcgtcaatccgctggatactgacgaagatttgaccatccgtgttggtagcgagccggaaaacgcgcttttccacctgcgtaaagtatcgaaggcatcgcagcgcaagttgctggttcgcgcactgaagcgcatagcgaagcagcgcggctacaccgatgcatacatccgcaagttcggcacgttcgctggagtaggtgattgggcgcggtcatgggccgacttttatttcaacaaatccggcgaattttgttcagcgcatacggactggctgcatggcacggaacacgatccagttaacggccacgagtggtacgaattcattgaggcggaattagacgccctttgatagcacgaattgctaaaacgaacgtccggggatggtgcatactatccccacactaacgaacaaaggaaattacccatgaacaaaccaaaaatcatcctgatcccgtccgtcgattccgtggttaatacttatgctaaattcaccaaaggcaagcgctataccgcaaccgcatttaccaaatgttccggcgaaatgctgtacaaggtcagcgatgactacgggcgcgagtatcacgtaaacccaagatcttcgcactatcttggtggccatcgcttcgatattgagtacccgatcgaagattgcagtaagcgcgactcgttcacctacgatgacagccgttctatcgccattcgcgctgcaaccatcggggacgggtttattagccgggcctgcatcgttgatctgatcccgtccgataatcacgccaaagacgacgccgacacgctgttaaatgccgtcgttcgcgccggaatcggcttggagttaagtgatgcgtcgtgcgaatcattcatgcgtgaaccgttctcacgaatcgcggagcttgaaaagcaagttgcgttcctgactggtgaacttcaggccgcaaacagcaagatcgagaatgttcgcaaaatcatgcgtagcaagcctggccatgacattgaagattacgcgcgggttttgcgcatgatggccgacgcattcgccaaactttagcagtagcacgaattgctaaaacagatcaggggtaagctggtatagttaccccatcgaaacgaaacggagttacagcaatgaaaatcaaaatcaccaaaatcaacactcttaacggcgacggctcaattaccctggaagaatgcggcctcaaaatcggcgaagttcttgaggtcgacggccacttcaacgacggctcatactgtgtgatcgctccgcgcaatagcgagtttatccaggctggtgacaatatcagcgtaagcgcagacgaatgcgaggttgtggaagaatgagcaacaaatttgggtactgacttacaccattggaaccaacgaggggcgcaaatcgcgccgcctcatctgcgacaccaaagagcgggcgattaggcagcaaaccgttcttggtggcgaacttgtcgagtatctccgcaagcctgaagcgttcaaggtgaactggccggaaggcatggatatcaacggcgctttagcgagcctgcgtgaattgcagaacaacccgaagacgtggagcgactttcaatgcctgcgggcggagccggaagtgaaggccgaccagttcaccaatgttcggtcgcagcacgcggagtggtcggatcgccagttcggcgacgttgggccagtcgggccgctcaaacacctggcgaaagaggcgatcgaggccgccgaagcgccggatgacattagcgagttcgctgatatcctcatgctggtatgggacgcaacgcgccgcgccggattcagcgatgagcagttggctgaagcggtggcggaaaagctggaacggaacaagcgccgggcgtggggcgaggtcaaagatggcgagccttgccaccacgtaaaaaattaacgaaatcgaatgccgtttaaagcgcctgtaagccattctggctggcgcaaatttaaggagtacgattgtatgcctgaatactcgaaagtcgaagatatgccgattggtgcaacaattactggtatccgcatgagcgagtcggacgacgccatcaagccgctggcgttcccggttacgcaggtggagacggacagcagaaaagggttcatcttcatctacaaaaatttcaatagtccgctgcgggttgaagtattcatcgctcgcggaacctgggtagaatgggagaaggccaaatgttcggactgaatgaagcgcagtacaacgccgtaaagcgcatagcaaagcagatggccgcagaaacaaaagacgccatcaagaaggacaagaagacctacgatcaggtcgccgcgaagatgatcgataaacattgggcgcaaatcaacacgctggttactcgcggccagtttatatggatagctggctacctggaaggccgattcggtcgaagggatggcgagtatgaataaaaaacagccaaacgattcagtgacctattgacgcaatcgcgctgatcgggtaacgtgaaccatgtagacacaagaggcggtaaacatccgcaagcctggccccggttaggggcgtttacataggagttatgatgcaatataaaatcatgctcacagcaagaaaaatgggtggcttttgcaaatcctgcattcaagagttcagcatgactattgaggcgaacgacaccgccgacgcggtagagaaagcaaaaaagcaatccggcgtaaatctggatacgcataaaatcaacatcaactacataagggaaatcagatgatgctaactgtgattattgctcttttaatgctttttataggttatcacgtcggagcggctcaccttgtagagcgactttcaaagcgggtacatgaaggcacctttgctgccatgatgtacaataagaaaacggcacgttgggaaaaaattggcgatccggatggtatcgcaaaacgaattgctttttcgccgcttccgtatgttgactgtgagctatttgtgaaactacagaagacgctgaatcggcgaaacaaactgatatgacaaaagaacccgcttcggcgggtttttttatgcccgcgatctgatatactcgcaaatcaacacagaaggaggattacaaatgtctgaagaacgtagaaaacgcgtaacgaaatcgcactttgcaggcaactttaaagcgctatatgaaaaggagttcggcgtggtgctagggcgcacggcagagatgacgccggaacaattttttgatatcgcaaagcgttacttccagtgggccgaagataacgcaatcaaggctgcggagacggcaacgtttcagggcgacgttaacgagtggggagtgaacaagcctcgaatttttacgctaacagggttaagcctgttttgcggcgtgaaccagtcaacgcttacacgctatcgccacgatcctaactatgctcccgtcatggagttcatcgactccgtgatctatgagcagaaatttcagcttgctgccgtcggcatgattaacgcttctttcgtcggaaaagagatggggatcgataagccaccagtgctgaacatcgacgctatcgccggggataagaacgagatcaccgaagagaggttagagaaggcagtgaccaatattcttgataagctgtaagggtcagatatgaacgaaatgatcatttgggaagacctgtcgccagccgataagctggcaattaaggcgcttagtacgcgcaacttttcgctattcatgaagatctggtttcagatcatccagggagaaaagctgatgtggaactggcatcactcctacttttgccacacggttgatgaaattatcgccgggaagcgcaagagcacgatcgttaacgttgcgccaggctccacaaagacggaggcgttctcaatccacctcgcgccgtatgcgtatcttaaatgccggaaggttcgaaaccttcagatctcgcagggtgacgcgctgtcaaaaggcaactccgatcgcgtgattaagatcttctcatctaacgagtggcaggagctatggccatcaaagttcgggcgcaagcagatcgatgaatttcaggtcatggacgataacgaccgcgtaaggctggaaatggtctcccgttcgtccggcggtcagatcgtcggtaagcgtggcgggtacatgacgccaggtttcagcggccttatcgcgctggatgatatcgacaaaccggatgatatgttctcgaaggtgaagcgtgagaaaaaccacgtactcctgaagaacaccattcgatcccgtcgagcgaagaagaagaaaggagacgaaacgccgatcctttccgtgcagcagcgattgcacgcgcaggattccacctggttcatgatgagcggcggcatggccatcgacttcgatcggattgttatcccggcgatggtaacgcgggaatatggcgaatcactccctgactggttgcgacctgagttcgagcgcgacgtgctttccggcccgtcggtggtaattgacggcgtggaatactggtcattttgggaggaaaacgaatcgatcgagaacctggttgcgctacgcgaagccgatctttatacgttcctttcgcagtatcagcaggaaccgatcgccctgggtggcaacgtgttcaagtcggagtggtggcgctattacggcgattccgacaaggcgcacgagccgcgcccggacaagttcgaatatacgttcatcacggcggacaccgcgcagaaggtcaaggagctaaacgactactctgtaatgtgctattggggcaagtatcgggatcgcgtctacttcattgacggaattcgcggaaaatgggaagcgccagatctccgcgttcaggccgaagcattcatcaagcagtgctggcgtcggaacaaggagtgcggaaaccttcgccggatctacatcgaagacaaggcgagcggtacaggtctaatccaggatttaacgaaggcggtaaacggcatgggcgagatcgtcccggtgcagcgcgataaagataaggtcactcgcgctatggatgcacaaccaatcatcaagggtgggcgtgtcgtgctgccggacaatcacccattcgttgcagagcttgaggcggagatgagcgcgtttacatatgacgattctcatccacacgatgatatttgcgacaacgtgtttgacgccgcaaacctggaaatgaacctgagcgacgatccggtagagcgaatgaaacgccttgcgggattgaaaaagctgggtcgctaatacataatgtgggcctgacggcccacacttaaacaaggttgaaatatgaataacattaagatggacgactataatcaaatctttaatggtggcgctggttatgcgtcaaccctcgcgtctatcgcggcaagatttggaacaatgtcgcaggttgaagagttctatcatgaaaacggcatggcgaagaaaatcgttgacgtgatcccggaagagatggtcgctcccggcttccagctaaacggcatttcagataacaccaagtttcaatctgaatgggacgggttaaatctggagccgcaaatcaccgatgctctttgctgggctaggctgtatggtggctcctacgtcctggcgatggttaacgatggtcgcgcattgacttcggcagcgaagcggggtaagccactcgaatctatcgttgtttacgaccatgattccgtttccgtcgcagaggaggaaaccagtccgcgaagcccacgattcggaaagcctaaaatgtacgaggtgaagccgctaaacggcgggcaaccgttcaaggtgcattatacccgtatgcactacatcgacggcgagcgcgtaaccaacaaggtgcgcaagctaaataatggcgctggtggctcggtgctgaacaagtcgattattgaagcgattcttgattacgactattcggaatatctggcgacgcaactactgaagcgcaagcagcagggcgtttggaaggcgaaaggcctggcgctaatctgcgacgacaaagaaggcgagtacgccgcccggttgcgcatggcgcaggttgatgctaattccggcgtcggaaacacgatcggtattgatgcggacgacgaagagtacaccgttatcaactccgatatttcaggcatcccggaattcctttccgcgaaaatggatcggattgtcgccctgtcaggcattcacgagatcgtgctaaaaaacaaaaacactggtggcgtaagtgcaagccagaacacggcgctacagacgttctacaaactggttgaccgcaagcgcaatgacgattacaagccgctgttagaattcctgttacagttcatcgtaacggaggatgaatacagcgtcgagttcgaaccgttgtcgctgcctaccgatgcggagaaagcggatatcttccagaagaacgccaacgcggctcgcagcctcgttaccgaccaggttattgacgccaacgaagcgcgtgatactctgtcggcgttgattcctgaactgaagctaaaaggcaacgctccgaagcagaaaaaacttccggatcgcgccgctggttcaggcagcacgcaaagcgcagagatcttaaacaacacggaggcggatgatgaaagttaacggcagaatcccaaactggcgttatcctgaagcaagcgagcgggagttatcccgctcaatgcaggacgcggtgacagaactcgtggtagaaatgcgggatcgcttagaccgccttaaatttgacgccacggctgaggaaatcagccaggcggaagacgatatcagcgaatctgccatcgtgttcttttccgccgtaattgcggcgctttcctccattgggttgactatctatagattcaattctaaacagtggcttgcaattgcgatcgcggctggcgggcggaacaacgaatcagttatgcgccttaaagaattcggtgctggtgggtatgaagactggtatcaggaatcgctaaataagtggcaggattacgccgaagcgtcaatcaggaagttagcaagcgatatagttgctgactggacaacgaaagttagaaccgccaacaacattggcaagtctcgcaagcagatcgatgaaatcatcgaaggtcgatacgctatctatggtagttggtcgcgcaaccgggcaagcggaatcatcggaacttttaacagtatgttgatgatgcagcgcctaaaagatgctaaagtatcgcattacttttggttcgggatgatggacgaccgcgagcgcgagagccatatcaagctagaaggtaagcgacgccccgttaatggtgacggaatcttccccggcgaagaatacggttgcaggtgctgggcggttccgtcatttgataatgaggatgattgatggttaactttaatgattactttaatcacgtaggaaaggatctgatatggaagcgagcaacatcaaaccgcgtaaaagttggtgatgttgccgggtggaaagatgagcatgggtatgtatacattagattcatgggcaaactgcgacaagctcaccggatcatttgggaaatgcaccacggcccaataccagaaggaatggaaatcgatcatattaaccatgtaacggacgataacaggatcgagaatttaaggcttgtaaccagaaaggaaaactgtaaaaacgtatcaatgagcgtaacaaataagagtggagttgtaggcgtgagttggtgcaagagaacaggtaaatggtttgcatccataagggttgataaaaaagagcgattcttaggtagatacgaagacaaaaacgaagccatttcagcaagaaaggcggcagaggcaaaatacaatttccataaaaatcacggagataaaaaatgaaaagagttcaaaggttcgacacggtaaagatgaaggccagattcgatgagaacggctttctggttgatactccgatcgtggcgcgtatcggtgcgcagacgtaccagacgccaaccgggcagcgcgtcgagttccgcccgcgttcggaggtgttcgatgctgaatcgctggcttcataccagggcaagccgatcactttgggtcacaagatggtgaacgcgcagaacgcaaaaggccttgtcgttggctcgtgctccggcgctggcaaagaagatgggattggtgttcttgttccggtgatgatttacgacggcgagtcaatcgagcaagccaaaaagcgcgtagctgctgagttatcagtgggctacacttcggtcgatatcgatcgcaaaggttggggtaataacgcaactggcgaatattatttcgatgaagaccttccggaaaacttcgaagagatgaaaaatgattccgtctctgattgggttcgctttgatgcagtgcagacgaagattcgcgtgaaccacgtagcgctcgttttccgtgggcgtgccgggattgcgaaattaaatcttgatagcgaacaagaattcccctatgatgacgactcaaaccacaaaggagctaaaacaatgatcattaaaattgacggcgtagatgttgaagtagcagataacgttggcgcttacattgcaaaactcgacgcgcaagttgcatcggcaaccagtcaggtaacgagcatcaccgcagagcgtgacgcacttcagaccaaagttgatggcattgaagatgaagtcgccgcccgcgttgctaaaatcaaagccgacgaagacgcaaagcagaaagttatcgcggttgtttctgccgctggcgtcaagtgtgacggcctggatgttaaggcaatgaaagttgcttacatcaaagaggttgacggtcgtgatctgtctgataaagaagattcgtacatcgacgcttcttttgactttatcgccaactctgataagatggctggcaatcgctccaaagtcttcggcaaaaaagaagatggcgagcaaaaagacaaaggcggcttaccgaaacttgacggcaccgaaatcatcgatccgcaggcaaaattccgccgctaataatttgcggccttcgggccgctaccagaccaaataaacaggagattcaaaatggcacagattccagcttcttattcccgcaagcgtgatattgccgtagcggggcagatcgctgatacgtcgctttataatatcgacggcacttgcgttgctgaaggcgatatcaaggctggcgtactggtggcttccactggcgtagtttccaatggccataaggtcgttaagccagcgaaagcagcgagcgacgtcattgtaggcatcgcgcagttctcgcaagcctactcgcctgaaggcaagtatgacgatgagagcgcggttaacgttatgactcatggccgcatttgggcgatcgcggacgcaactgttactgaagcagattgcgtgtttgattctttcgccacctttaccgcaaacggcaccgtagcgaagggtgatgccggggttatcaaaactggctacaaacacactggcgaatacaccaagaacgcagatggcaccgttctggtgaaagtgcaggtgcttcagggcgccgttgctccagcggctgcaactggcggcgctggcgtataaaataaggggcttcggccccatttttgcaccagaaaaaaacctttgacggcttaacgattcgtgatattcttcatctcgttaagccaaatacacaaacaggagtttttcagatgactatgaaattagatgcattcgaacagagtgcaattaaggtcgcaatgcagggcatgggcgtcgatgccgcaaaactggatgcttacggtatctggactgttaagcagatgactcaattactgaatcgccagtatgagcaggcatacccgcagaccagcgcacttgagcttttcccggtaactaccgagatctcgccgaccgcccgccgctttgagtggctcgaattcgacggcgtaacctctgcgaaaatcatcgccgattacaccgacgatctgccgaccgttgaagcgatggcaaaagagaagtcagggaaagttttccgcctgggtaacgcgtggtttatttccatcgacgaaattaaaactggtgcagcgctgggttcaagcctgagcgatcgaaaagcaaccctggcccgcgaaggtcatgagacgctcgtaaacgatctggtgttcaaaggctccactcctcacggtatcgtgagcattttcgaccagccgaacattaaccgcatgaccgccagtgctgcatggggcaatgattcagcggcggctgaaaaggcattcgaagatctggaagacctgcttaacatgatcgaagaaaccacgctgggccgccatcacgcgaccaacatcgtgattcctccgtctaagcgtcgtcttctgacgaaaaagatgccggacactagcggcgactcttatctgacttggttcaccaagaaccacccgaacatcaccattacggcgatggcggagttggaagatattgacggcgcaggcaccaaaggcgtgctggcatacgaaaaagacccaatgaacatgagcatcgagatccctgagcggttcaacatgctgccgatgcagccgaaagacctgcatttcaaagttccgtgcacctccaaatgcactggtctcatcgtgtaccgcccgctgactattgcgattctcaccgggatttaatcaaaagcgccttcgggcgcttttttattgcattgcattctgcaatgtgctttaatttgaaacctaaagtaaaccaatggagcattaacaatggccagtaaaaaagaaaccgtagaaaccgtagaaaccgcagaaatcaccagcgaagaacagacgccgcaggttgttcaactgcaaaacgttggtgcatgtgcaattcgctataaaggcacaaattacgtctatgagcaggttttcgaagtgccagaaagcgagatcgaccgattccgccacgaaatcttcaaaggccgcgtcgagttctacgacaatcctaaacgcacgcgcgaatacatcgcagcggtaaaggcgacagcgaaagagatcgtgcagcctaaaagcgcggaataacaaaaaccaacaaagggcgcttcggcgtcctttttcatatcaggagagcaaccatgaattacacaattcaagatgtgatcgataaaatgcgcagccttgcacctccgcttaaagaagttccagatgaactgctgtctgcatgggttgtgcttgccgaagaattcgtttgcaaatcccggttcggagactccatcgttacggcgatcgcgttgatgaccatgcatctaatgtttttggacggcgcaatgaagcaggaaggcgaaagcctggaatcttacacgcagcgagtggcgtcgttcaccctgaccggggagttttcccaaaccttcgatcgcgtgtcggcgtcaagtgataacgaaatgctttctacgccgtggggcaaaatgtactggcgtatgctcaagatgcgcggcggcggcttcggcctgcttaccgccgggaacgtgcgccgctgcggaatggttaggtgatcgctatgaactacaaagcaatccaggcacgcgcaagcgctggcattaaattcttcagcgacgctggcggcgtgttcaacaagtacacgaaaggcgctggcggaggaatcgatccggaaaccggggaagatatcattcctggcgaggtggtgacgacaatcaagggagcgatcagggatgttaatgaccgtgacattaacggcgaaaccatccttgctggcgataagcgcggttttttcactcatgatgtgccaatcatggaaggtgacgaaatcgaagtagacggagagcgctaccgcgtggttaatgcccgcccggtaaaaccaacgggaaccgtcgttgcctaccgtccagttttgcgcagggtggcgacttatggctaattacactatccgcgaattcacaggcgcaattgatgcgtggtgtaaggccgctggtgatgcgctggaggacgttgtaaggtttacgtgtgaagatattcaccgcgaccttgtaatgcgttctccggttgatacagggcgcttccgtggtaactggcaaatcacctttaaccgcgccccgctttacgcgattaacgcatacgaccaaactggcgaaaagacaatccagaacggcaaagccaacattgcactatacgcaaaaggggccgggatcacttcgatctggttcagtaacatgctaatctatgcgaacgcgctggaatacggccattcaaagcaggctcccaatggcgttatgggcgttgttgcgatccggttgggcgtttatgttactgaggcaatcaagcgagcgagggcgaaaaatgcattatgatatggcgttaaaatgcaaggcggcagtggctaaatttgccgccgagaacgggttgagggtcgcgggggataacgttgactttatcccaccgagaggcggggaaacctaccttaaagtctcctacgtcgaggcggattcaagatcggttgacctgtcaaggaaatgccgagtctatctggcgatggttcagattgacgttatctttaagcctggaatcggaaccgatcgagcgaggattatcgcccaacgcgttgcaaaatccttccctgaaggaaagattgttgatcgtgacggtaagttatatgtgagcgagtgggcggaggtacacggcgtgcagaagcacgaaacgggttggttcttcccggttcggttcacagtaagatgcgaccgcacggaggagagcggctatccatccaactagcggaacctcacgtcgcttataatttcttgccagcctggaaatatgtaggcataatggcggtgtaaaactttcattcaaacaggagtattcaacatgcatttaccaaacggtgctaaggtcttctttgagaaggctcgcggtgcgaagattccgtttaccgcaatgaccaacgacgcgaaaaacccaaaaatcacggtggcagatggcaagctgaaggtgaaagatattgtgatcttcaccgattgcacctgggacgacttcgttaacaaggtggctcgcgtaaaagcagtgacagcaggcgtggcaacgctggaagagttcgacacctccgacactaacaagtatcctggcggcgcggctactggtaacgtaagcgtgatcactgattgggtggaattgccttgcattcaggatttaggcaaagatggcaacgaacagcagttctataactatcagtgcttgagcgatgagcgcgaacaatccgaacctacttacaagtcggcagtgacgcttaactacacgtttgcgcacgattacagtaacgcgatctaccctgtgttgcgttcagccgacgccagcaagcaggcgagagcgatgtacatgtatatcccgcgagcttccgaggttcgttactggtctggaattgcatctttcgatgacattccttccacggctgttaacgagatggaaacggtaacgcttaacattgcgcttaaaggtgctcacgtcttccttccggttgccgtgtaattaaatggcggggcttgtgcctcgcctttttttgtgcataatagcgaataacacaaaccaatcaggagttaacaaaatggctaaattcaaaattcaaatcggcggcaatctcccttctttcaagctgcctgtaaccttcacttgccccgacggcaaagaagcaaccatcaccatgacagtaaaacatcgttcaaccgatgagatgaaagacttttatgagagcgaagataaagcgccaaagggtaacgccgagtttatccgcttcatggctgaaggttgggatctggatgacgaattcagcgatgaaaacatttcctggctttgcgctcacttcccggcgttcgtcatggcactgccacaaacttacatggccgcgctggcgggccaccgtgcaaaagtttaaggcgggctgtttatctcacgcttcagcctgagctaaccgatcgccagcttgcggagtacgggttaaggcgatcggattatgaagcagatcttgaaacgatctactttgatgaacagaccgcccaaagctggcagctattccaggccatgcaaacgcagtggcgaatcgggatgaatggcccgacggggcttgactataatacgttgcctatgctgttcgaattgtataaaatcgacaatcgagaagcggcattacttgacttgcaaatccttgagggtgaatacctgaaggagatttacaagaaatccaaataagcgcctactggcgcttttttcatatgggggcgaaacatggctgataaagtagctgggctaacgtttggcgttgacgtgtcgcaggttgataaagcggtacgatcactcgcagaactgaaaaaccaaagccagcaaacgggcgctggcctacagtcacttgctgacgctgaaaggcgggccacggcgcagaccgaggaaatgaaccgcgcattgcagcgccagaagcaagagactgacaaatcaaaaaccagctttagcaggatcgcaagcgccatcgatcccacgatcacaaaaatggccaacttgcgcaaagcgacggaagaacttgataaagcgtgggcgcttgggcttgttcctgacaaggaatttttccgcctgggagccatcattgaatccacaaccaacaatctacggcggcagcaggcggcgctaaccgaagaaggtcgcgcagcaatcgcagaggcggaggcaaagcagaaggcggcaaatgccgggcgtgattttgtcgccagcctgaaacagcaggctgactccatcggaaaaacacgcgccgaactgctggaaatgaaggcggcgcaattgggcgtatcggcagaagcggccccgttcattaacgcgctgaaacagcaagagcaggcgttaaagaaacagcaaaacgctatgggcctggctggcatttctgccgggcaatataaaatggccatgcgccagttaccgatgcagatcacggatattgtaacttcccttgcgtcaggtatgccagtctggctggttgcggtgcagcagggcgggcaaatcaaggacagcttcggaggcttgagcaatacgtttaaggtgttgttgagctacatcaacccgctaacggttggtgctgcgtcgttgggtatcgccctggcggcaatcgctaaagctggttatgactcctggagtgcgcaacgagaactggcgaatgcgctggtgctgactggtggctatgctgcgaccacaaccgggcagatcacagccttaaccgaagagattaacaaaaactcatcggccacgattggcagcattcaggaaatcgcaacatcgctcgccagttctggtaagtacaccatcaaccagattaagcagatcacgaagactacggcggaatggtcggcgcagacgggggagagcgagaagacgatcacagggtattttgatgccatcgtaaaagaccctgttaaggggcttgccgatctcaatgagcgttttaattttctgaaagagggccagctaacctacatcgaatctttgcgtaaaacaaaaggcgagacggcagcagcagatgcggcgacaaaactgtttgctgatactatggataagcgccttaaagatatcgcggacagtgcaacgccactcgaaacgatgtggatggatattaaaaaatgggcggctgactcgtggaagtgggtaggcgatcacacggtaggggcgctaaaccttatcgttgacacggtttccgcaatcatcaacacgatcagaaagctgattgccgacggcgacgccatgatcgcgcagttcatcgttgacgctggccgacagctacagaagatccccggcatgggagactttgggaatgactttctggcgcagcaggagcagttaatcaaggactcgaaagccaaatccgccgagcttgcaaaaaccattgcggaacagcaggcaaggatcgcaaaaggcgagatgggttacattgacgccgcgaaggataaaaccctttccggtgggtacagcagcaaaacgaaggatcgcgtaaatcaggaagaaaaagatatcctgaaaaaccgcaacgccaggaagcagcaggtagacgcgggcgttaaaattgatgagcagtatcaggctgaactgctatcgctacaggcgcagttaaaggttttgcagcagcacaaagggcttgatgacaagatcagccagcagcgcaaagactacttcgagacggttgctaaattccaggttttggaagaggcaagccagaagcgaaaactgacccaaagcgaacagcagatgctggcgaacaaaaagaatatcctgtacatggcggagcaaaaggccatcgtgggagatcagattgttcagcagcagagattgaacgccttgcttgacaagtcgaccaagtatcaaaaccagatggcggagaaaaccaaagcgctacaggataccgccggaatgggtagcaaggagcaggagagataccgggccaatgcgcaaatggcggctgactggaaaaacaacggcggatctttaagtgaccctggatttaaagcgatgcaggccgcaagcgataaattctacgcacagcaagatgcgcaaatgatgaactggaaggccgggttcactcatgcgtgggctgatattggcgacgaagttaatgacgtatacaccaacatcggggatatcactaaaaacacatttaacggcatggcgagcgtgctgactgattttgtaatgactggtaaagccagctttagcgactttgcaaagagcgtgatcactgacattaccaacatgcttatcaagatggcgctgtttaactcgctttctgccgcgtttggtggtggcggcacgttcagcttcgccaacatgttcagcaagggattttctggtggtggctacactggcgacggcgggaagtatgaaccaaaaggcgttgttcacggcggggaattcgtattcacgaaggaggctacgcaaaggttaggcccggaaaacctgtaccgactcatgcgcggctatgcaagtggcggcctggttggtggtaacgcaagttccggatctggaatcaccaacggcggcaacgtcgcagcgtcggcggctatggtgttcactatcggtgacattaacattacgatgggttccggtcaggatagtaaggggatggagcagggcgtaaggcagatcgtgaacgatatgttcaccgaggctttgagccaaaacgggcgcattgcgaagttcgtcaatgagaaaacgagggggtagtagtggattcctttaaatggtgtacacaaattcaaggaggggcggcaaaggtagccgtctccaacaacattcgatcgatcagtttcggaaacggctatatccaaacggcgtcgagcggcattaacaccaagcgccggacggttccgatcgtttatggcggttcagattgggaggaggtttataacttctgtcaggatcacgtaaccaagccgtttgtgtggaaggcacctgatggaagaatgggcgtattcgtcgtaactgccgactccgttaaccttgcgccgcatggtggcggcgtgtttgaggtaactgcggagttcgccgaacgcttcacttcagccggataatcaaaagcgccctttacgggtgcttttttttggcctatgatctggagtcaattagaggagggcttacgatgacagccaacatttcaaaagagtttacgaactgcttacaaaaacttttccccggcgagatcctgacgctgatcgatatcgacgccacaaagttcggcgggcaggtctaccgattccataacgagaacgtcgcctatacaaccgaggagcttttagcggcggtgaacggcgggacgcttcagccaaaaatgatcacgtttcgcggcgagcaatacggcccgcgcccgttcggcctgggcgggatcgcaatgtcgagcgatggcacagtggaaaagccaacgttgacggttagcaatattgatgcgcaggcgagtgctcttattcgcgcctacaacggcctcatgcaagccaaagttacggtatgggttttggtcaatgaattgctgcaaaacgacggcagtgttaaagagggcgattttaggcgatttgtttactacatcgagcgaccaaagcaagtagacccgcaaaaggcaacgttcgaattaacatccgtgtttgatatggacggattgatgatcccggcccgactgacgcaaaccgtttgctattgggcgcagcgcggctggtataaatccggcaagggctgcgactacaacgggcagaacggatacttcgacaagttaggaaacagggttgacgacccgtcgcgggatgtttgcggtggcctggtgtcttcttgcaggcttcgttttggcaatgaaccgttgagtttcggcggttgtgcgacagcaactttgaagagtggtagctaatatgttgactccgaaaattaaaatgcagatcatgcagcacgcgaaggaagtctacccgcacgaatgcgccgggctggtaacgcaaaaatcacgcgtgcaaaaatatcaccgactagacaatgtttctcaagatcctgagaacgaatcaatgccggacgaaacgcagtatgcgatggcgtcaatggagggggagccgatcgccttcgttcattcccatactggcgacggggcgaccacgattccgagtgccacagatttatgcttttgcgatgagtctggattgtcgtgggttatcgtctccatcccggaaggtgatatgcgaatcattgagccgaaacgccgacctctgattggtcgcccctgggctttgggcgcttacgattgctatggcctaatcatggattttcacaagcgccacggcgtcacgctaaaagatcggcgattgccgttcgaatggtggaagccggaatacaaagagaatctttaccaggattactggcaagaggacggattcattgaaaacactggcgagcctgaagttggcgatatgatcatcttccagattcaggcggaaaagtggaatcacgcgggtatttacgttggaaacaataacatccttcatcacgcgtttggcaagctgtctcgccgggatatctattctggatggtacgagcagcacaaggttttaatttgcaggcacaaggagcttaaacatggcatcacatacaaagacgattaaactttctggttcccttgggcgtaggttcggagtattccacaaacttgcggttgattcggttgctgaatgtatccgggcgctgtcttaccaggttgaggggtttaagcctttcatgcagagcaaggttggtttaaatatgcgcttcggcgttgtcgccgacggaaaaccaatcagcgcgaacgaccttgcgacttttgccgtggcgagggagattagaatcatcccgatcccaaaagccagaaagaacggcgggttgttgcaggtcgttatcggagcggcgattatggttgcggccttctttactggcggcggctcgctggcggctatgggcgctttttcgtcggcagcattcatggctggcggatcgatggttttaggtggcgtaatgcagatgatcgcaccgcagatgggcggcaacatgcgggcgagcgaatcgcctgagaataagccatcgtatgcgttcggcgggccgattaataccacggcggccgggtatccaatccagttgccatacggttacagattggctggaggcgcattgttcggttcgggatcttacgcagaagacaacaactaattaagccattcgctttttagcctgggggcgtagcctccgggctttttgtcgtgtacaattgcgatactattaacaggaggctaaacgatgactaatatcaaggcccgcaagggcggttcaagcaagccacgcactcccgtagaaatgccagataacctgatctcaaaagataagatcaagttattgcttgctgtttcggatggcgaggtggttaacgacttcagcctgaagcagttgcattttggaggcgtcccggttcagaacgaggatggaacattcaactatgagggcgtgattgcagagttccgccccggcacgcaaacgcaggactacattcagggcttcagcgaatcaagcgctgaattccaggttgctcgtgaagtcactcacaacacgccttatacgcttaccgtatcgaacaaaaatctttctgccattcgctttcgcctgttatggccgcgcgtgctgactcaaaaagataacggcgatatggtcggatcggttgttgagtacaagatcgagatggcggtagacggcgcaagttatcagacctacctaactggcaaaattgacggaaagaacacgactggcggttacgatcggagcattcgcgttaaccttccgcaaaacttcacgtcgcaggtgcttatccgtgttagccgagtaactccggacgctgacggggtgaaggttgtcgatgcgttccaggttcaatcatacgctgaggtcattgatgcaaaattccgctacccgttaacggccatgctttacgttgagttcgatagcgatctgttccagaaccagatcccaaccatctcactcaaaaagaaatggaaaattattcaggttccgagtaattacgatccgattaatcgcacatactccgggacgtgggacggtgtttttaagtgggcgtggagcaataacccggcatgggtgctttatgacctgatcatgaatcagcgctatggtttagaccagcgcgaacttggcatcccggttgacaagtggtcgctgtatgaggtggcgcaatactgtgatgaacttgttcctgataatcgcggcgggatggaaccgcgctatttgatggatgtaattgttcagtcgcaggttgaggcgttccagttggtaagggatatttgttccgcgttccgtggaatgacgttctacaacggtgaaagcctatcgattatcgtcgataagccgcgcgatccggtgtacctgtttacggctgataacgtcgttgacggcgttttcgttcggacgttcccaagcgaaaagacgatgtacacgtcgtgcaacgtcatgttcgacgacgaagaaaaccagtacgagcaggatgttgaaccagtattcaacccggacgcagccatgcggttcggacacaacccgaccagcattacagcgatcggatgcaccagaaggacggaggcgaaccgccgtgggcgttggattctgcaaacgaacctaagcgccacaaccgtttcgttttctactggtctggaaggtatgattccttcttgcggcgatgtgatttacgttgcagatccgcactggcaatctgcctttaacctggtgctttcagggcgaatcatggaagtatccggtacgcaggtatttttggcgttccgctgcgacgcgaaggctggcgacactctgatcctgaataccgacgacggcaagcctgtgcgccgcacaatcgccagcgtttcggcggacggtaagaccctcacgctaaacgttgggtataactttgacgttgcgccggacagtgtattcctgatcgagagcgatcagcttgcagcggaacagtatgtagtaacccggattgaaaagggtagtgatgacgacgaattcacctttgccatcactgctacgcagtacgatccgaacaagtatgacgcgatcgacaatggggtaattaccgatggccgaccaacttcggttgtcgacccggattcaatgggcgctccgaaagacttaacgattagctcattttctcgcattgttcagggaatgagcgtcgaaacgatggtgatcggctggtctgccgtgcagtatgcaaaactgtacgaggtgcaatggcgcaaggatggcggtaactggaacaacgtcccgcgcaccgcgacaacgcaggttgatattgaaggcatctatgctggcgagtatcaggcccgcgttaggtgcattggcggcgggaatgtagcgtctccgtggtctgctttggctagtgcatcgctgaccgggaaagtcggagcgccaaaaggcccgattaacctttttgcatctgacaacgagatcttcggcattcgcgttaagtgggccatgccagaaggggcggaagacacggcatacattgagctttaccagtcgcaaagcggaaccgatcaggacgcaagcctgcttacactgattccttacccggctgctgaatactggcattcaattttgccagctggctacgtgaacttctataaggctcgaagcgtagacaggatcggcaacgtttcagaatggactgattacgctcgcggtatgtcttcgactgacgttaacgctatcacggatgttatcctggatgagatcctcgacagcgacgcgatgaaagaacttcaggagagtacgcaggatagcgcggcaaaactcaatgactacgcgaacagtatcattcaaaatgcgctggcgaatgatgcggacgttagaataatgaaaaaggagaatggaaagaggaaagctgaaattaaacatgcagaagttctcatcgcaaatgagacggaagccagggtgcagcaggttaaccagatctcggcagaattcaacgaaaacctaaatgctggattaactcaagttaatgaggcactagccaatgaaactgaggctcgcgttacgtcggaagaggcgctttcagcaaggattggagagaactccgcagcgctagatcagaaactagactcatgggctgacgttaatggagttggatccatgtatacaatgaaacttggactaaagtacaacggacaggaatataattccgggatggccatgcagcttacagcaagtggtggaagcgttgtttcgcaagttatgtttattgctgatagatttgctatcatccgaaatgctgagtctggagcgtacacgttgccgtttgttgtgcagaatgaccaggttttcatgaataacgcgcttattcaggacggttcgattaccaacgcgaagatcggtaacgtcattcagtcaaacaactatgtttcaggtagtcgaggatggtcaatagacaaaaacggaacctctgagttaaatgaggtaacagtgagggggacaatttacgctactgacggttggtttaagggtactgtttatgcagagcatattgaaggtgacgtgatgatcgcagagtcaaacacgataccattcaagacatattcagatattgatagcggagattatgaaatactgaaaattcatggagaaaactttgataggggcatcgatacgaacctgattatacaagtgaattctacattcaggaatacttttagagtaattgttcagactccagggaagggggaaatagaattctacagtatagacactggaaatgacggaggtacaagagcatacgcgctacgtggcttcgatttaccagcggctggaagagggcaagagaataggatcatcgttagggtaactcaaagcgggaggggtagcagcataaaaacattcactccatgggttgagagagataatggaaccactggacaagaaacgtctgatggagtcatatataacactggttttatcagagagagggcatacatatcggcatacagaaaaggaaatagaatagtagtctagtgacaaaagcgcccggctgggcgctttcttttaatatgaatcatagatgtaaaaaaggggccgaatggccccttttttcttttgttgtcttgatatgcttgatatgtcatatcgcaacaaagttgatgttgtttttgtaaactcagattgtttctacatgagttagtctttgcagaccgtagatggtgtgaagcgtagcaaatgccatttagtgtatcctcttgtcgcgtctaataatgaatttttagtgattacattactgtaaccagccaatgttattgcctgaacgcccattgatatcgagcagcaggttaggtatgccagcaccttttgcattctctggaatgccaaggttaattgccccacgcctggttgatggtgggcttggaggcaacagcgcatattgcggtttctcccatatgttgccgattagggttgtcagtgcgctcagatcaggggctgtgctccatgcgtcagaccagataatgttatttttgaggataacttgagacgctggcgcaattgttctggttcccgttgacagttgtgcaatgatatctgaacccttcatccacttgcagtagaaaatgcaactctccacagtcagcgacggaacagatgcactctcagtgtcgtacccatttgttgatatcaggcgacgctgcttgacgcttgacgtgtcaataaacacacaattacggacggtattattgaactggttgcggtggtgagatatggaacatgcgtcgtttgtcggattcccaatctgcccctgcagcctctgaattccatcgttgaacgcgaaacagtattccactacgttattaccactcccctgccgacgtgtgtaataaaactcaaagttgctcatcccggcaggtggagctgcctgtagccctgcgttatcagcagagacaaacatcactgtacgggcgcagccagtggagtaaacgtatctgacaacgttatcccaacacataccgtcaatatcaaccgccatgttgtcaggtgccattggataggagccatgcacctccagtttttcaaacataacccgattacaatgccacatccagaaaggtgcgtcatacgccgacactcccccagtagtaaatttatcccaacggtacgaactgtagtagcagtcacgaacgcagctctgccactcgttgtccgtataggcgtcgttcttactggcacaagtgtgaattaatgccccctcctgtacaatatttgtaaacgagcagcgtaaaacctttgctccgtaagtacgggcggcatccccacggttatcagtggtatcagatacccaggtattgccacggatatagacaccggcgttaaccatattaaacatgcagtcttctacagtcattttatgtgcgggattagaaatatctgcaccataaccgacaccaaaaagctgaacgtgcctcccaatcgtgtttttattcggattgcttacagagtatgcattacctgtgaaataacagtttttcacatgaacatcagcaaccccatctgcatcaccagtgcattgcaggttaacactggttgctgctgaggtaaacccgtcatctctgtccataaaatggatgttccgcaccgtaacgcgacgggcattccacgatgctagttgccccgcagaatttgagatggatagccattttggcggcgggccatccccgtatgtgtcaaaaaaactcatttcagacgacgtgttcactaacctggcattaacggcctccttcaacactgtgccgcgcctgattagaattgaaaatgggtagctggtgattgctgcaatagcagcagtaacagttttaaacgctgatggaattggtttattttcatcatcagaagggtctacatataagtattgcatttttagctcctgttaagctggttgaacgtgcagatcgagccaatcgaaaccgttaatgtttgccagtgtcccggcgctcgttctaacttcgatagtgaaggtattcgtgccctgagatacgatgttaactatgtacggaggtgttccgaacgaggttcctgagaaaccaacgggagggcaaaccttccagtggtctccacgtaaattgcatccgctgataacgtactgacctgttgatgggttggtgacagcaattctcgcttcatttcctttattcgccagatgatattcaccacctatcgcaaaaaccccgtctgataatttatcagatagtcggttagtcacattcccggaaacgcgaactacagttcctggagagtaccgaacatcaccgttattcattttcacgtaaaaacgatctgtcgccattttctctgcgaacgaataaaccagatagtttggagtatctaccgttacattattccgtaagtcattatggtaaaaagtcaccacattggggtcagcaacattaatcggggtgaatgatattttttgcccatacgacggaagtcgcaggaatagtttcgctactgagttattttggtcattaaccaatcctaccgctggcgttaatgcagaatccccccagccagattggccgccatgcagcgcggtaactttcagccattgatagatactgccttggtcaatggacggggcgttattgagggcttgcgggttaaacgtgaccatgtaaacatttggcgtgtagttaacatagttgcctaccgacagaataccagagaccacttttgacccataccccgagtagttaacatcaaacaagcgataaagaactggtgataaattttcaactgtagggcattggtcaatcgttcgttgcaatgatgtgccgatgtcgaaactttttaccagcttgaacatctgcttatcgatagatgagccagtagggtatccaaggtcgttaaactggttggggctaaaaacgaaaatatcgataataccattatcgttagtggtaataagaaaacctgggcttaggtcatcagattcatttccagcagaggggaagcgaacaattttatcttcaaatccattatgaaaatatccagtgccctgcactattggtgttgaaatttgagcagctgataacctcccgtcaacaattgcatatgtctgaatgcgtccgcgctcgtctaagactaaggcagctttattattcggcccgccgaatactattccggcaacgcctgccgggtcgcctggcatctggtgaatttcaaattcaccacgcttaaatatacgctcccatactgacaggttaacatctccaacgctctctggcccttcacctgagaaaaaattaccaattttcatatatccgtcaggctgtgccaaaactacaagcgttgactgttcgccagcatcattgataatttgctgcacttggtctctagcagtctctgctgcaacctctgaagtttttgccttactttcagacgcagccgcagccgcagcgcttgattccgcagcttcggagtctgccttaatttggttggcaagattttgcaacgattcgaaatcgaactccttaaagaactcgactgcatccgcaattaccgtttcctgtgactgataatagcgaagagtttccgcaacatcttgagccaggccgtcaacggttagtgagtcacttaatagtatcgcataatcactagacgctacgacagcgccgtttgtggtaattgctttaatttcagtatcgctgacaaccttgtttactacggccatttgaattggtgacgacaaaaacataattgtcgctccagggcgaatcagcgaaagcgatgattgccactttgtgccagtgccagtaactgttccgtctgcggacatagccgctttgccttctctgtatagtgccatgcatttagtcctctttggttgattgagtaacgcagataatagcatcaatgcacagaaaaaaaaaggagcttttcggctcctttagttgttaaatcagaatgggatatcatcatcgaaatccattcccggattcccccagccgttttgaggtttaggcgcttgctgcggattgggttgttgaggctggccacacccggattgctgattgccgccgccgctttgcgcaggttcgcgctggctgaattcgagttgcggcataatcatttcgttgtggctgtaaattgtgccgttgtgctcgcggttcacgatctgaagcgtccggcaggtgacgctaatcaccttatcaatttgcagtgcttcgtcgtaccacttaatcatgttttctttggcaaagaaaacggcgcggtagttcgtgtaaaccgtttcgtcctggccatcacgattgcggatcttcattcgctccgacaggtctacggcgtacattttccacggcccgttattgttgctgccttccttgacatacggttcctttcggataacacctgttacaacatgcattgtcgttcctatggggcggtttcccgcccggttaaattagttgaaagatgaaatatcttgcgcttctggttcaggttttgattctaccttttccggctcacgtttcgcaacctcttgcggcttaccaggattgaagccgtttgccggggtgactttcagttctgcctggcgtttggtgatatcgtcttccgtcattttccattccgcaggcgttaacgtttgtttcgccagcttatagatctcacgaagcgattcgagatcttcgcacgcgtcaattcgttttttgaagtctttcggcgtcatcttcgtaatttctgcatcatcatccgcctgcttgatgccgagagctgcggccagtgcataacggcgggcgtaagatgttgttgagccgtatgcttgttcgacggttttactgatcggcatattgtactgaaacgccatgaactcaccgctttcatgcaggaacatcgtttcgaggtgcataaccttttcggtgctggtatccatcatggattgaatgaccataattttgtttttctcaagcgccggggaaatcgcgtcgaggatatccccaagatttgcataggtgttccccaggtggttgttcttcccgcttttcttcgcggcaacgaagccagattttgccttgattaatgctgctgcgatggttgtaaatttttcagatgtacgcatgataaagtttccttttcctgattggtaatgcgcactatatcacaagtgcgcaccagtgtttagctatttgtgccgtatacgtccgggaacatatatttcacgaactgcggagtaggcaaaacgacttccgccgcgtttgactcatatgatggccatgaatcatgcttcacgcattccgcatactgatgaatcacgctttgatactgcttgcgaccgatatcgatctgctggctggtcagggtgaacgcaagcggagcaaacggtgattttttctcctgcgttagcagtctgacaactaccgggcgtttttcgttgtaggtcttcacgaacagatcgcgctgcaatgccatcttgagatagtaaccaaggttgaaagcgagccgcccgaaatcgtcaggcttggaagattgcgttgttttgtagtcggtaatcaccacgacctcgaaaacttcatcagggttgaatccccactctttgattagttcgggatcggaaacaacgtcaacatgatctagtcgaaccttaaccttgacgccgaagatctcaccgaagatcgacaattcacgctgtgcggtaggtgattcgatacaggcggcgtgtcgcgggttggccagcatcacgctgcgcatttgaacaaccgcatcgaaatcaacatccctaaccagcttccgcccggagttcatcgcggcgctttcgtcgcatagttcaatcgcccaccaaacatttacgtcaatcccggcgcggtatgccatctccagaagttccgggtaatccttgttggacgtcccaatcaggccacacgctttcagcttcgcagacagtgccgacttcgacgtaatcagatctttaacctcgcccggagaagtcgcccgcaggtactcgccattaaattttgccgtctcaagcatacaggtatgcgaacaggttccgaacgccagcgcggcggtttcctcgcgcaccttgaatttccagtgcgccggggatgttgcgtaaatctcgccgaggcttgagccgctaacgtattccgcgcaccaggaatcaggatcgtgatattgctcgttagtcaattcactgcttgtgtatgccctgaaaattgcttcagccattgatattgctccatttgtggtttcgttgcgttaagtatacgcatgacgattacaggtgcaaggcaaaaagtgctattcgcaattggttaaaaaatgagcgaaatttacgtaagatttagtaagatgcatcttacgtgactttccccatacatttcattgagttaatgcaaatcggtaagatggtaagatccctataggtaaatatccacgaaaaatctggcgcgggatcgcaaagcaaaagacacgtacccggagaaaccttaccaagataaatatagagagatagaacaataataataatattattatttatcatatacttactatctatatatggcggatagttggttaaattttgcgcgaaatttacgcaagattcatcttactaaatcttacctaaagtggttcgaccagttgtaagccactgaatttcaggaataaaaaaaggtaagactgattttgctcaatcttacctaaaatctgatcaatatttaatcagagaagcgacgatgccttgtacaacttacgttcaaatccgagcttaaagttgtcaccgttcggaacgataactttaagatcccgatcgtcagcagccgccagcatatcccgatctccacgacggcaaactacccgcatttctcgcttaccttttccgcccttgcctttatacctgtacgccacgatctcgacgtttgaaggtatgatgcaggcccaaacgtcgcacttgaacgaactagcaatattgaagtgcatcgcctcaatccaggattgagcaaggtaaattggcccgttaccgtcgtcgctctgattggtcactatcaccgatccgaaggtcagatcgccagccaacatcttctcccgaccctcctcatcaatgaacagcatgttgcaatactcatcatctggcccatcctcatgcacgagttgcattggtagcgcgtgaattagctcctgtctgccgttctcgtgagtttttacgccaacctgatatgatttgatatactcattttcaatgccctcatagagcgttacaggcgtgctatcgacggcctccgttctgtttaaaactgccatcactctttcatgatctgccatctttccgtagtcatacccgttatcacgagctacctgcttgtttctcttgaccacgtattcttgcggaaccttgccgagatagcgcccaagaatgttgatgcactcgctatacggctggccgcttaacttcattaaccagccgatccccttatcagcaccgcagcctccacagtatgcgccgccgtctccgcgcgtttctaacttgtcagtccagcggaatcggtctttgcctccgcagttcgggcagtcctggtgcttgccgttgaagtatcgagagtggatgccgcaaatgttctgcaacgcttcgcgccacatgccagccatgtacggcaaaacctctttttcatcgtaaaaatccacgtcgttacctccaaataaaaaaacgcccacacgagaatgataacccggcaggcgtttagtgtttagacaaattgtgctatcggactacgcggagcatttcgcggcggtcgcatcggcgcgtcactggctttccgttgctgtcaaatcttaaatctggtcggcagaatgaggcgcggaatcctttgcaattgttccgtcggtagctcttatgtacgagataagcgccatcggctgagatcatgccgcgcttacgccactgctgaacaacctggatactaacccccaactcttttgccgttccagcgatgccaccgaaggcatcaataaccaactccatccgcgcagtcaacccggcgcgaacctcatccttcagcacgtagtaaccagtcggtcgcttgcgtttcttcttatctttcccgcgcgatgttccgttgttgccgttcaaggttcgcttatcaacctttgccatttgttccataatttaaccctcatagcattttttgttaaacatgataaaatgttccctgtattatacacgcaactatgcgaatgacaaattaggattgcccatgctcacaattgaacaacaaattgaagcctacgcagataagatcacgttaatacaaaagcgattcacggttggcaatatcgttccatacccatatcaggcggtggcgtatattgagacagcaaagcggatcgcaaaatatgaacatccgttttacattaaggcttcggtttccgccgggaaaaccatcatgatcgccatgctcgcagcgcagtgcaaggcaatgaacttacccatgatggttcttgctcgccaggccgagatcgtgaagcaggattcagaggagatcagtaacctcgacgttccgaactccgtttattgtgccgggttgggcacgaaggcggcatacttcccgatcgtcgtcggatctgaagggacggtggttaatggtctgtttaaaatgctgggtgactatacaccttcagttctggctattgacgaatgccaccaggttgactggcaagatttggcggaggcgatcgccaacaatgaatcgttcgagtacatgagcagaccgaaggataagccgtatcgcgtgaacggtgaactggtcgatgccgaccacccatacgacgaaaaattcgactacgtagaattcggcggcggtcgaacacagtacaccatcgtcatttgtgagttaatgcggaggtgccttgagaagacagggcgagaacttcgcatcgttggctatacgggttcggagtttcgcggcgtcattccgattttacaggaagacaagagccagcctggtttttggcgcgagcagatcaccgacattaacacaaactatcttgtcgagttcggatcggtggttccgacaatttttggtgatactgaatccgaagggttagggtatgacctgtcagaattccacggttccagtcaggacggtacgcaggattttagcgcggaagaattgcgcaagatggaaaagaaaatccatgaatccggcgaaatgacgaagctgattatgcaaaaggtcgtggagcgtgcgaaaacccgaaacggagttctgataacttgcgctggacagcggcattgcaaggaggcggcgagctatctaccgccggacgcaacatacgcgatcatcaccgaaaagacgaactcaaagaaacgcggcgaaattttggataaggcgaatcgcggggagattaaatacatcttccaggtgatggccctaaccactggcgttaacgttccgttttgggatttttcggtgatattgcgcaagatcggatcgcttacgttgcttattcagcttttggggcgaggtatgcggcttctaaaggactggcaaaaacagcctccttactcgtgggtgaaagaagatcaccttgtctgggattttgccggaacaatggatgaccttggccagttgtatttcgatccgattttggagcaggcgcaataccaaagacgcaagagcagcaagaacggccccaaaatttgcccggtatgcaagggagaaaatagcgagtacgcccgccgatgcatccacaaagacagcaacggcaatcgttgcgaatatttctggatatcgcagcgctgcgaagaccagaaagacccgcgaacagggaagattaaggtaaaaggttgttacgccgaaaacgatattgttgcccgccagtgcagatgttgtggggtgcagcttaaagatcccaacgacaatctcaccgggaagcattatacgcagaatgactggtatgatgttgtcgggttcgatatcggcttgactcgcaatcagtccgggatcatcttcaattacgtgttactgaaccatgacggcgagcggttcaccgccagggaaaagttcttcccggaatcagagaatcagatttgcggcaagttgtggcggcaaaaggcagtctcccagcacgttgacgacgcggtaatgcgtggcaagttgggcggtatgaaaaacgcccgcaagatcctggagtatgcggaatacttccgcgcaccgaagcgcgtaacgcatcgcatcaacggcaagaaggaagatattatttcacgcaaagattttggagacgcagaatgatcgcagataaaggtgattatctcgaatactacggcgggcctgtgaaggcttgtccgcttgagaaaatcgatcagatgaatagcgtttcgtggctgcggcacgaataccctgattatctgttctggcacacagtcaatgaaggcagcaagcacaaggcgagcgcggttatcgatcatcaaatgggattgcttaaaggcgttagcgacttcgttatcctgattggtttcggtggcaaatacccgttcgcagccattgagctaaagcgccagggtaaggcgcaggcgtcgccagtgagcaaggagcaaagggaattccttgctgccgcccggcgtcgcggcggattcgccgccgtggcctatggcttcgagcaattcaagattgctttctgcgatgccataaaatagcactttttgttaaaaccgcccggcgaaagccgggtatcatttccacatcgaaacgaagaatggagtgttgaaaatgaaaaagatgctggctttagttgttctgtctcttggtcttattggttgcagcgaaaaaccgaaaacatatgattgcggtggtgaagcgtttgaggtaactagcaactatatgaaagttgtcaagggtgaaaactctggcgttataattgatggcgctggcgaaaatcaatataaactgcttactccttttgggtacgctcattatgcagtcaacaaaaacactattgatgttagcgtgggcgcttttcacaataccttaacctgcgaggttaaataataatggcaaaagatatcgcagacaaagacactcatgacgcattcatcacgtttgagcaattggagcgcgaaacgtttattggcaacgcccttgccactggcggacactatcaagccgtcaggccagataagttctatcaggtaactggcaaccgatacgcaggtagtaaaacgccggatattgtgcgcgacaagtgggcgacagatcgaagtctgatcgcatacatggaagagcgttacggcaattacgatcttgatgtcgccgcagaccgaagcaacgcagtttgcccgaagttctacgacgaaaaaacggattgccttaaacgctggtgggggaaaaacaagcacatttggctgaatcctccttactcgtttccagatccgtttattctcaaggccattgagcaaatggagcacgacaaccagatcgacattctgctacccggcgacaattctactgcctggttccgtgacgcgcagaagatggccgccgaaattatctggattgttgccgatgttgaagaggatgattacgggaacaagttaagtcgatccggtcgcctcgccttcatcaatggattaagcgggaatccagtcgacaacaacaataagggaagtgttattttcatcatgcgcaagctcaagccgggagaggagcaaaagacactttacattccggtaagcgagatttgcccgtcattagctaaaaagcgtatgcgcaaacgtgggatctgaaaaatggaacagacagagtctttcgccgagtatcttcggatcgttgttgaacttctggacaagcacggcttcattgggacggatgaggaaaagttagcctttgctgacaccatcgacggaacctacatggagttcatggacaacggaaccccggtcgctgactggccagaaattcttgaacgagaattgattgagtttaaatcacatgaaggcgcggagtatttcgcaaaacagcactaattgctaaacaatacccgccgcgtgcgggtattattactccaccaaccaatcaggagcaaacgccatgaaaaccaaaaccattgcagacaccatcaagatcgtaccagtaaaagcgcaagtggtatcgcgtcaactggttaacctgtctcgcctgtgcatggccgactacatggcgaacccttcagataattgccttgatggtgtagtcggtgagatttattttcgcgctggttatggactggaaagcgtggccatgtatgagcaaatggccgaaggtttttgcatttacggtgacgaatgatgattgtcgagactggtcgcgctgccgtatggcagcacgcaaaagaagcgggaataagtgatgatatcgtgaagatctcaaagtatttcgatatcaaagatatatcaattatctttggtgggaagctcacctatctaaacgagcgcccggtgaagcgcacgcgaatagcagtggcaacgcgtgcggaggccgacgcgctgaagatgttcatacatgagtcgaaacagcagaaaaaatattacaagtagcgggggcgtgaagaatgcgatatattgcgatcctatttacggcgatcctgttcacgatcgcaatcatgaactgcgcaattcaattaggataaattatgttaccgaaaatcacagacgaagaattcttagccgcccgcgaggaaggtaagacctaccgcgagatcgcggaagagttcggcatgaacattcgaagcgttgaacgtcgtggcgttcgcctggcacgacaaggacacctacacggaaacgcccacgtttcgaagcatatcccggacggcttcggcgtcaaaggcacgtcgacgatgattcgcgcggacggctccgaggtcgttcggtgggtcaagtcggaagtagacagagatcgcatggtcgcgcttatggaggcggcgcaggcggctttctgcgaagaccttccgcgagctgaaccgcaaccgctggatgagtcgaagttctacattgaagatcagcttgccctgtacccaatcttcgacctgcatattggggctatggcgcataagcatgaatgcggcgagaactatgataccagcacggcagagaaggttctaaaccgcttctttgattattccgtgtcggtggctccgcaatccaaaaaggctgttttgctggttggcggtgacttccttcacagcgacggcctggacgcagtaaccccggcaagtggtcacgttctcgatcaggacagccgatacgcaaaacttgtttatgttgccatccgctcgctgcgtcgcgccgtgtcgctactgcttaacaatcatgccgaagttgaagtgcaggtaatcgaaggcaaccacgaccaggccgggatgatttggctacgcgcagcgctggcggcgttctatgagaatgaaccgcgcgtttttgttgatgttagccctgcgatcctgcatcgcaccttgtggggcaaaaccatgctgggctacacgcatggccacacgatgaagaagcctgaaacgcgccttgctgcgatggctaccgacttccgcaaggagttcggccagtgcgactacatttacacgcattccggccactggcatcaccagactgtaacggaacactcgttaggtattgacgaggtgcatggccagttaggggccaaagacgcttacgccgctcgcggtggttggcgctcctatcgccaggcggcggttattctgtacagcaaagaatatggcgaagtaggccgctttatctaccgcccgaacatgtaaccacaacggccccgcgaggggccaacaaggaaaaccgatgaatagaaatatctgcattttcgatctcgatggcacgttgtccaatggcaaccaccgcttgcacctgctgccgaaaaaggatctccaccttacagaaagttggagtgaatttaatggtgcatcaattggcgacagcccaatccaaagcacaattgatgtagcgaatgcgcttcatcgctccgggatgattgtcgttatcctgaccgggcgatccgatgaggtgaagaccgaaacaatgatttggcttgaccgttacggggtgaaatatgacaggctcatcatgcgtcgcgccagcgacaaccgtaaagacacggtaatcaaggaggaggagttacgcaaaatcggaattgatcgcattgttgcggcatgggatgattcacccaatgttattgcgcacttgcgcggcctgggtattacgacttaccaggtctgcgactacggagacaatcttcaagatcatttaaaatcgcacggagtagacaaatgaaaaatgtaattattctcaacggagcacccggaatcggaaaagataccatcgcggaaattatctcgcggaagtgggaatacaagaaccttagcttcaaacagcctatgtttgccatcgcgcgtgctgtgcttggatctactgattttgcacgctttaccgccagataccacgaccgcaagcacaaagaagtgaaatgcgattttttgggcgaccgttctccgcgtgaattcatgattcacattagcgaaaacttcgtcaagccgaccctgggcaaaaatcagttcggcaagttgctttgcgattcagcgctaacttcgccgtttaactgcatcgtcagcgacggcggttttgatgaggaggtcgagcacgtcgcagcgcatgaggcgcttaacgtatttgtcgtccgccttcatcgtgacggcatgacctttgagggtgatagccgcaaacacattcgacgacccgatctgatttgtgacacgtatcacgaacttgattttgatatgaccactggcgagcctgaagacgacgcgcaaaaaatccttgatatggtttcagatgttgcattaaaattataaagttaatgcctttattatcaccaccttaacgattgggaaccttgacgggttcccttttttttgttcttaattttgccaaatgaatatatcatcaccttaccatttaactaacagaggttgcatatcatgcgggaattcatcaacgcggcaaccaatagcagcggcggtgttgcccttgcgggatctgcatccgggcaattaatcattgctgccattggtttatttttcatgatcttatttggctcaatcggcacgtggctgaagtggaaagactcaaaagccatccgggaggcgattgattctggcgacattaaagaggcattgaggatcaggagcaaataaaatgggaatgaaaacgcggcttactttcgcggcggcggtggcgatcgcggtcgcgttcctccccgaagtggaggacactaaatacacggtttatacggatatcgctggcgtaccaactgtatgcgaaggaatcacaggcccggacgttatcaaggggaaaacctatacccggtcagagtgcgacgcgcttttaaccaagcatatccaggtagcaaagcgaaccgttgacagcaaaatcaaagtagatgttcctgacaccttcagggcgtcgatgtacagcttcacgttcaacgctggcggcggcgcatattctggcagcaccatgctgaaattaacgaaccagggccgattgcgcgaggcgtgcgagcagctatatcgctggacgtactaccgcaacccgaaaacgggtaagatggagaagtcaaaaggcttgcataatcgccgggttcaggaatatcaactatgcattaaggatctaaaatgattaaggtaattggtgtggctcttacggttgttcttctgtctggttgcgcttccagtgtcccgatcctttccgatctggtgggcagcaagccggatatgacggcgcaagtaggcgcggagaacgttaaacaggcggttggcgtgacgaacaaaacggacacgtcaagcaagcaggagactacgttcaaagagtcggcggtaggaaaggttgacacgtcgaacaaaaaatccgtaacgacctccagcattcacgccaaccagatcacggcggacaagatcgagatccgaaacgatgaaagcggaagcctgactccgtggctgattggtggtgttggggttgtaatgctggcgataggtgcgttcggtctttggcgggaacgaaaaaacaaaggggcgtaatgcccctttttctatatgtaccgcttgacgtgcaatagcgctactccgtcttcatcgttaagaccatgttcaaccgtgttggttgcagccattccttgatagagcaagatgagcgcggcacgcaagtaattttctggtgtgatctgtttcacacaaacaagcctgtgaacttccgttatcagatcttccacctggtttcccgaaaagctgttcatcactgagttggtcaaggtgcatcatctcccatatgtatcggttatccatcccttcgaacgaccggaaatcaaaacctatttccctgttatccggccccgtacaccacacagagccgttttttccgtcaaggtatccattcgtatagcttcgcgctaaaaactccttagagaccattgaggcgaacatacgttgcgatacgttggcggcttttgccagtcgaggcgcttcgcggtgcgtatagacgaacttcgcaaaatcctgccgggtgaactcccggcgagattcgcagaacttgtaaatgtcaagaataaacatcaattacctcatgaacgacgggttgataaagacttcggaatccatcacgcagataaagcctaattcctccatcttcggcaataagcgttccttaatctttttgctcaccccggcctggcctttgaagatcttcaggttgcggcaggcgttataaatgccctggacggtcataacaccttttgcctgtttgcagcgactggcgataacgtcatacatcgctttaatttccgctccctcaccagcaaagccggaagagtcagccgacgacaaatacgttttgctcaattcatggaacataatgatcgcttcgtcaatggtcgccgtgtcgatcttcttcgagcgcttcccgccgggttgccagttccggatcgtgtgaatcacggacgccagacgcataacctgcttatcaaacttacccatcgcgccgcgaagcattgtatgcgaatacttgccgccgtcgcctaactccggttctaactcctggcgggccttgttcagcctacgcattgccgcgtcagtaacctgcaacttaatgttcgactcgctcataatgtcatgaatcagccggaagtaatccgccttcagtgactggtcgatcggctcataggtcgaattcccgttttcgtcgatgaacacgcgttcacccaaacgggtttgctcacgaaccaaaaggaagcgttcagataccccgatcccgcgagagccggcctgcataatggcgtcgatggtttcatcctgggcaattacgcaaatgcagcccaaagcctcgaatgacatattgttgctaacgtcggcacgagcgatcgatacgtggcctttatcccatgctttgagcaccagttcgctgttcgtcttcttaccgccatcgtttccatacgtgatccctaaaaggctgttaaccgccgtcgcctcatcggaaataacggcaaagtttccctgtcggttgttaatcttcgccagaccttccggggtggtatcagataccgggaaagttaggtcacacaatttttctaacttctcctcaagttcgtcacggtcttcaaaaagtttcaccatatcagattgcgataactccccttttagcgcctgcttgttggcggacagcttcgccatgattttcttacgctctttctttcgagactcgttaatgcgttcgacttcggcgacaataggatcgatggcaagcgagttaatggcagacttaccagcggaaggcggctgcgacgtgataacgtaaagcgttgtcggttgctcgctgccgtggtactcgacccaaaagcggcccatcatcgcggcggatacggttccgagaaagtgcatgtaagcggatgattccgggaactgaacagaacgcgctgcatttagcgccagcttgccgacaacatcataatcattggcgatcgagattgttggatacttatccgcgtttacgtcgatatctttgggctttggccagaatgaaacggagtcacgatacccgttcgcacgaatcgcaacgcgcaggggactgatcccctccctttctgcgatggcgataatatcttgcggtgatacgcggtcatttaaaaacatgcccttgctcctgattggttaatcgttcggctaatcatatgccgtattaaatccgagatccagtgataatctaaacacgcttgaaaaacgcgcttggattatcggggcgcatggccccgaacccgtcacaggtatttagcttcgaaagtcgttccgtccgatacactgaagccaacttcctcgcggtacagcgtccagcggcatccatcacgatcgaagatgtatccggcaaccgcgccgagcgcacgaccgctttctacctggtagcgcttgccgacgctgaaggattttttcatcgggttgctatggtcaaggccgacgcattttagcgttttggtttttagttcgatgaacgtcgcaatcacctggccaccagcgccagcaataaacaactcgccgctaacgcctaccgacaaaataacgcgcttcttcttcagttcgacgctgtcatataccatcattgacacattgccttcatcgtcgacgcgggcgggataaaggttattttcgtgtatattaatagcgcggcttgacgtgcatttaatcttgattgacttcgccatttattttctttctccgatctcgatgtacaggtttaccaaatccagaaagtcagccttgcttttgcaacccaacttaaagccaacgtgcgactcaattttattttgcatcgcagccagtgttgcgccgccattattcatcctgagaacttcgcggcatacttcggcgagcttttgagatatcatttcttcaccacctttatttccatgccttcgcaagcgctcttgatatcattaatcagacgattaagccttaaatcagtcattacatggtgatgacgtatatcaataattccagcaacgactaacagcatgacggcaaagataaaaccaccaggcccggacatacacaaaacagttaacatcatcaagataataaatttcatttccgttttactccgttgcgtttcgatggggtgattctacccgactttcgccgggtagttttagaaattcgtgctattctcgataattcgcctggaacacggcgcgggcaaaacctcgcggagtaatggaacgcagcattttagtcctttctgaccttccacccaaaaacttccaggcccaaaagaaattcacgccttctactccatccggcggcgtgagccgtttcggttcgacaaaaccgtttccgtgccatatgcacgttttcttcgtgtaattgtcacagtggggcattttgggatgccacacaggctcgttcggagaaacatagccaccgaagtcgcgcggatggaaataaaaatccggctttcgccatagtgacgataatttcccgaccgggttttcgaccatccaggggcaaccatacttattgcctaattgctcgaccatcttcgcatcccctgctgcggataatacgtcattatcttcccttacgtgcttgattccgctatgcgctaacagcgtgcatggcgggaaagcgaaaatgaagtcaggatctggaatgccgagaatcgatcgcttaacgtcaaaatccttgtcaatccaaatgttaacatactggatatttgggtgaaccattcgaatgctatattctccgtggtcgccggagtcggcgttgaaacagtacaccttgcatcccttgatggcccacggcaggcccatgatgccggagccgtcgaacatgcagtaaataaccttttctttcatgctttccacgcctcaatgaacattctgttcgattccagcgtcagcgtgacgccagccagggaggactgaatgagacgaccgcccggaaccgtcccgatgatgtagcggcctttcgacttcgtgatcgtgatctgagtgaagccggaggcgcggttcatgcggagaacgacgcggccatgagcgttcaggacggcgagaatggaatcagtcttcggatggttcattgtgtagctccttcgtttgttggtatggggacagtatgccactatcccgctgtgttgttttagcaaaacgtgctattccggaacgcaggtcgcgtaatcctggctgatgtagatcgtgcgctgaacgcgaggttcgagatcaccgagttcctggatggtaacatcgttgcttcctacccggcacggaaccgatccgaaaataaactcgccagtctgcttgtcgttgatttgccatacattaccgccttcctttttgacaaccaggaaaggcgcactgtctgcactgaactcttccgggccacgaccgtagtaatgcgtgatcgcagctttggccgcagcgctgaaggcatcggtaacgtcattggtcgccttgtctcggatggccttgatacgttcttcaggcgatccgatgatgtaggaaaagctgttcgaaatggtaactgttcgcattatattttaacctcgttttggtggatgaagtcggcgacgtaatggcattcgatcgggttctcgatacccgccagcacctcgcaagacccgttattcagtagctggcaatgctggcactccgcaccgccaacactggcaatgacaatggcgatcccgttgcatgaaccgccgaacattcgatgagggaagtggtaagcatcgcaggtgcaaaccacctccccggcccgccgtttcctcatacctggcccttctcgatgcagaaaacccaatcacgagcgtcaaccgcaaagcgtgcaacgccgtcgagcaccacgaagacagtaaacccgttgacgccgcgacccttctcgatatcggtcacggtgcggaacagatcgcttgcgccatattgaattttatccccgacgactacatccgcaaatgctttcatggttaatctcctgactggtttcgatgggttaactataccaggcctcgcggcccggcgtttagcaattcgtgcttatttcactgctttcttcgctgccttgtacgcctctttgaaagccggaacatcttcgaccggaatccagaagccggagccatagccatcgtcatagcaagggcattggtcgcagtagtcgccccaggttttctcttctccgccgacagagaatccagtgggcattttgcataacgcttcctcaaccgcttcgatcttgtcggcgtcgctatccatgataacgaagttccacttgccgttatactcgctgcccaggttgattgattcgcgttgaagtttcatagctttagcccctttggctcaattcgtttcgttgaagtcatcatagcaaagccgatcggatggattttaacaaaaaatgctattcctgcgattgctgattattccaccgattcggaatagtggaatagatggtgattgcacctgattccctggtgattagttttgacgaatcatgattgcttttgattgtttcattttgtgcaacgattttgtgagtgtttcaggatttgcaacgaattgcataaa

SEQ ID NO: 250 - DNA, 49701 bp, synthetic construct
  source 1..49701: mol_type = other DNA
aatgtatgcaccatgcacgcaatttgccgatcgaagccagcaaaagcgccaggtgtttttcgccaacatttacgtcgtgtggaaatgtgggggaggaataatcttacctaaaaattgcgcaaaaagtgaccaacataagcctataatagatatataagtatatgataaataataatattattattattactctttatctatatatatgtttggtaagatttcttcggggaggttatggattcctcttgcgcaagccatagtttttagatgttccgccgcgaaaaaatgtatatagggatatataggggatgacagcaaatcttaccaaacacgcttaaacccttttacggcaaggcttgcgggtggtaagatgacattcccacacaagcaaaaacgacgtaaatgttggagaaaaacacatgcaatataaaggctatgagttcgaagaagtcgacgtgtccgagtggatgcagtacgacgcagataagcaggcagcttaccatgaatggctgcaatccatcacgtttggcggctcaccaggggtagacgatcggccagttgctgaaaagtcacccgccgcattcactggtaatcgttcgtccgagatccggcgcatgttcctggatggcgggcgacgtatccagatgacggcggaggagttcgcggataagttcggcgttcatccggtcgacaaccatttccgcaggccgttgctgaaactcctggagccgggagaagtgttgcgggtgagcctgggggcggggttgatctccgtctttaccgagttcgacgcaatgactggctcaaacatggaggctgaggcatacaggcggcagggcgctatctccgagagggaaaggattaagggtttagtggccgctcttgctgtagactttgccggacatgccctggccgggatttacaaggcgaacttgttcgcggctatcgatcttggattgaccgccagcgatatcagccaggaagcggccaccacgcaatagcactttttgttaaaacccggtcagagcgatcgggtattgtctttccatcgacaacgaaccgaggaaaacgaaatggtcactcttatcacatgggaacacgaaaacagcgagccagtggtgcgcgaattcgagaccgtagcggcatgttacaacctggcggcaaatggtggcttttacaaggcgcagatcgttaacgagttcggggttgttgattatgaattttaaggcgagcgacgtaaaacctggcgtggtctacggatcgcgcctcaataaccgcctttggcggtgggacggcgaaactatgtggactaaaggcgagggcgatgttatctggcatgaatgcggctggccataccccaccatgagccgcctcgatatcgcttattatctttcggttggcgatatgcacgagatggaagatagcactttttgctaaaacactgctgtcgagatccggtattatttattcatcgacaacaaagaggagatgaaaatgagcaagaagaatccatattcaaccagcaactaccataacgaacacgtcatgcgctggcactggcagaaactcaaagaacgccaccttgcacgccatggcaaataatcacaatagcgccgcttcggtggcgctgtatcccaaccataaaaacggcttacaccaggaggattggccatgccacgattttcagcaacaacaaaacttcgcaccttcgccgggatgccgatcccatactcatcaaccaaagccgtccagggcagcgagcacggcgtatacttccactggtgcggcaagtggcgcttcaccgtcattcgcggcttttacgtgacctgcgaccacgtggatattaccgactattccggcggaaaccaggttcatgagttcaataggcacgaatagcactttttgctaaaactcgatcggggcaatgcgttattattaccccatcgaaacagaggagcaaaaaacatgattggcaaccacaacaacgaactgaacgcagcagcccaccgtcgcgccgtcgagcagaacttcaacgcgcttaaagtagcctgcgatgagatgaaagcaatgcttgaactgccgtcatgggatccccaactcgaagactattacgacggcctccgcgtcaagcgtgacgatatcatcaaccgcctgcgcctggctggaatgtttctgtaaggagaacgcaatgattcacgaaattaagtctggaaaacaagtagtggccaccatcacgcagcgccacgttgtagcatttcagtttaacatccccggcaccaacgatatgcagtctcttgacgtgccagtttgggctaacacgatcgccattgatgccgacggctcgatttgggcctacgagtcgaccgccgaggatgtttgcatcccggactactcgcgcaaagcctgggtggattgtgggccttccgaaaacaagatgcggtcagtaggggagatggatcgcttccatgattgggcagaatcgaagattgaccttcgcggcctgaaatagcacgcattgctaaacgcccggtcaagggatcgggcataatcatcacgaagtctattaacaaaccgattatgcaaggagacagaagaatgcaacaatttgaatctcgcggcaagacatacaacctgccggacactgctacccatgccgcccctggtgcgtgcggcggcctgtattttaaggatggcgatagttggtttttcatgggggatgtggttgggggtgtaccgacgaagacaggcagcttactcgtgggcttctacgatcacgacttggtggagttgaagccaaagcgcgtaccgttcgctttctggaaaaaaatcaaaggggcgatctttaaatgaatcaattcgaattcctggcgcgtgcgcaccgtgcgcttgcaatgtacgccttcagcaagaacatgaagattatcagtgttgaggttgagttcaacaatatcagcatttccggctacgttggcgactcataccacgtgacgaaattcagcttcccatcgctggcttgcctggagcgtgaggcattcggtttctgaatagcactttttgctaaatgcccggtcagcagatcgggcataatggccacacaccaaacaacggagattcaccatgattcgcactaccagaccactacccaataacctttacgccacgattggggttcgcgcggtgagacttattcacatcaacgaagttggcaacgtggctattttgtggtttaagcgccactcaagcggtgttggcctgagcattcaaagattcgggcgctttaacggcaactcccaaacccattctcattgggttgatggctcatactgctggacgcacgttaagcacgtcgagaacttcgacgccaaatcactgagcgacgacgacgcctggaagatggtaacagacctcttcggttatgatgcctgcatggaggtagttggatgatacgtttatcagacttcgatcgccactgcttaaccgggcaatttggcgaaaagccagtaatgtgcaagatctcgaaggtaaaaggcgaccccgtcgagcaggtcaatacgcttaaaggcctggcaatgcgcaaccgactttacatccatgtgcgcggcagactgttcgcacagcaggttcatttttcgcatgggacgtggttctacactggcggggacggggttggcccatcgcagaaaagggttatgctgcgcgagataatcgaacacggttacgtttggactaacgggatctactaatggaaacggtaaaagtaatttgcacgcacgctggctattcgccgctatccacctatttcacgcctggccgcgagtatgacgccatgttcggccccggccttgatgaagtgtggattttgcaggacgaccagaacaccacggaagacgaagaattttggccagcctgccgcatgccggacgaaaagatcgccatgtacgccaataggccatacgaaaacaacgttttgtttgaggtgaaagtatgaaagtaagcaaaaagaaactcgcgctgtattgggccttcttcctggctggccttgccctgcataacagcgtgggctggcagacgatcggaatgctgtgcatgattattggtgtatgccgactgtctgagattaacgggttccgccgtggatatcgggcagcattcagcggcgaaaaagaatagcactttttgttaaaactgccgtaacgtcatttgataaagtggcgttactgaagtgaaacaatccaatcaggagcaacgcaatgaacgataatttaatcgcactgctggaagaactgaattcctacggctgtgcatacatcgagctttctagcgaacacgttatcgaagtcattattgacgatgacgcagggttcaccaagttaagggtggctaccggggccgaagaggaattcgaagactgcggcatccgtgaagtaaccaaccttctcgaagttcaccaggtgaaggagatccgctaatgaaaaccgtcaaactaatggttgtcaatgcggcccgcgaacgtgaacgccaccttatcggctgcgtattcgatgccgtcgaggtaaaagactcaaaaggagactttcacgtaatacagggcggataccttaacgaatttatcgtcaatccgctggatactgacgaagatttgaccatccgtgttggtagcgagccggaaaacgcgcttttccacctgcgtaaagtatcgaaggcatcgcagcgcaagttgctggttcgcgcactgaagcgcatagcgaagcagcgcggctacaccgatgcatacatccgcaagttcggcacgttcgctggagtaggtgattgggcgcggtcatgggccgacttttatttcaacaaatccggcgaattttgttcagcgcatacggactggctgcatggcacggaacacgatccagttaacggccacgagtggtacgaattcattgaggcggaattagacgccctttgatagcacgaattgctaaaacgaacgtccggggatggtgcatactatccccacactaacgaacaaaggaaattacccatgaacaaaccaaaaatcatcctgatcccgtccgtcgattccgtggttaatacttatgctaaattcaccaaaggcaagcgctataccgcaaccgcatttaccaaatgttccggcgaaatgctgtacaaggtcagcgatgactacgggcgcgagtatcacgtaaacccaagatcttcgcactatcttggtggccatcgcttcgatattgagtacccgatcgaagattgcagtaagcgcgactcgttcacctacgatgacagccgttctatcgccattcgcgctgcaaccatcggggacgggtttattagccgggcctgcatcgttgatctgatcccgtccgataatcacgccaaagacgacgccgacacgctgttaaatgccgtcgttcgcgccggaatcggcttggagttaagtgatgcgtcgtgcgaatcattcatgcgtgaaccgttctcacgaatcgcggagcttgaaaagcaagttgcgttcctgactggtgaacttcaggccgcaaacagcaagatcgagaatgttcgcaaaatcatgcgtagcaagcctggccatgacattgaagattacgcgcgggttttgcgcatgatggccgacgcattcgccaaactttagcagtagcacgaattgctaaaacagatcaggggtaagctggtatagttaccccatcgaaacgaaacggagttacagcaatgaaaatcaaaatcaccaaaatcaacactcttaacggcgacggctcaattaccctggaagaatgcggcctcaaaatcggcgaagttcttgaggtcgacggccacttcaacgacggctcatactgtgtgatcgctccgcgcaatagcgagtttatccaggctggtgacaatatcagcgtaagcgcagacgaatgcgaggttgtggaagaatgagcaacaaatttgggtactgacttacaccattggaaccaacgaggggcgcaaatcgcgccgcctcatctgcgacaccaaagagcgggcgattaggcagcaaaccgttcttggtggcgaacttgtcgagtatctccgcaagcctgaagcgttcaaggtgaactggccggaaggcatggatatcaacggcgctttagcgagcctgcgtgaattgcagaacaacccgaagacgtggagcgactttcaatgcctgcgggcggagccggaagtgaaggccgaccagttcaccaatgttcggtcgcagcacgcggagtggtcggatcgccagttcggcgacgttgggccagtcgggccgctcaaacacctggcgaaagaggcgatcgaggccgccgaagcgccggatgacattagcgagttcgctgatatcctcatgctggtatgggacgcaacgcgccgcgccggattcagcgatgagcagttggctgaagcggtggcggaaaagctggaacggaacaagcgccgggcgtggggcgaggtcaaagatggcgagccttgccaccacgtaaaaaattaacgaaatcgaatgccgtttaaagcgcctgtaagccattctggctggcgcaaatttaaggagtacgattgtatgcctgaatactcgaaagtcgaagatatgccgattggtgcaacaattactggtatccgcatgagcgagtcggacgacgccatcaagccgctggcgttcccggttacgcaggtggagacggacagcagaaaagggttcatcttcatctacaaaaatttcaatagtccgctgcgggttgaagtattcatcgctcgcggaacctgggtagaatgggagaaggccaaatgttcggactgaatgaagcgcagtacaacgccgtaaagcgcatagcaaagcagatggccgcagaaacaaaagacgccatcaagaaggacaagaagacctacgatcaggtcgccgcgaagatgatcgataaacattgggcgcaaatcaacacgctggttactcgcggccagtttatatggatagctggctacctggaaggccgattcggtcgaagggatggcgagtatgaataaaaaacagccaaacgattcagtgacctattgacgcaatcgcgctgatcgggtaacgtgaaccatgtagacacaagaggcggtaaacatccgcaagcctggccccggttaggggcgtttacataggagttatgatgcaatataaaatcatgctcacagcaagaaaaatgggtggcttttgcaaatcctgcattcaagagttcagcatgactattgaggcgaacgacaccgccgacgcggtagagaaagcaaaaaagcaatccggcgtaaatctggatacgcataaaatcaacatcaactacataagggaaatcagatgatgctaactgtgattattgctcttttaatgctttttataggttatcacgtcggagcggctcaccttgtagagcgactttcaaagcgggtacatgaaggcacctttgctgccatgatgtacaataagaaaacggcacgttgggaaaaaattggcgatccggatggtatcgcaaaacgaattgctttttcgccgcttccgtatgttgactgtgagctatttgtgaaactacagaagacgctgaatcggcgaaacaaactgatatgacaaaagaacccgcttcggcgggtttttttatgcccgcgatctgatatactcgcaaatcaacacagaaggaggattacaaatgtctgaagaacgtagaaaacgcgtaacgaaatcgcactttgcaggcaactttaaagcgctatatgaaaaggagttcggcgtggtgctagggcgcacggcagagatgacgccggaacaattttttgatatcgcaaagcgttacttccagtgggccgaagataacgcaatcaaggctgcggagacggcaacgtttcagggcgacgttaacgagtggggagtgaacaagcctcgaatttttacgctaacagggttaagcctgttttgcggcgtgaaccagtcaacgcttacacgctatcgccacgatcctaactatgctcccgtcatggagttcatcgactccgtgatctatgagcagaaatttcagcttgctgccgtcggcatgattaacgcttctttcgtcggaaaagagatggggatcgataagccaccagtgctgaacatcgacgctatcgccggggataagaacgagatcaccgaagagaggttagagaaggcagtgaccaatattcttgataagctgtaagggtcagatatgaacgaaatgatcatttgggaagacctgtcgccagccgataagctggcaattaaggcgcttagtacgcgcaacttttcgctattcatgaagatctggtttcagatcatccagggagaaaagctgatgtggaactggcatcactcctacttttgccacacggttgatgaaattatcgccgggaagcgcaagagcacgatcgttaacgttgcgccaggctccacaaagacggaggcgttctcaatccacctcgcgccgtatgcgtatcttaaatgccggaaggttcgaaaccttcagatctcgcagggtgacgcgctgtcaaaaggcaactccgatcgcgtgattaagatcttctcatctaacgagtggcaggagctatggccatcaaagttcgggcgcaagcagatcgatgaatttcaggtcatggacgataacgaccgcgtaaggctggaaatggtctcccgttcgtccggcggtcagatcgtcggtaagcgtggcgggtacatgacgccaggtttcagcggccttatcgcgctggatgatatcgacaaaccggatgatatgttctcgaaggtgaagcgtgagaaaaaccacgtactcctgaagaacaccattcgatcccgtcgagcgaagaagaagaaaggagacgaaacgccgatcctttccgtgcagcagcgattgcacgcgcaggattccacctggttcatgatgagcggcggcatggccatcgacttcgatcggattgttatcccggcgatggtaacgcgggaatatggcgaatcactccctgactggttgcgacctgagttcgagcgcgacgtgctttccggcccgtcggtggtaattgacggcgtggaatactggtcattttgggaggaaaacgaatcgatcgagaacctggttgcgctacgcgaagccgatctttatacgttcctttcgcagtatcagcaggaaccgatcgccctgggtggcaacgtgttcaagtcggagtggtggcgctattacggcgattccgacaaggcgcacgagccgcgcccggacaagttcgaatatacgttcatcacggcggacaccgcgcagaaggtcaaggagctaaacgactactctgtaatgtgctattggggcaagtatcgggatcgcgtctacttcattgacggaattcgcggaaaatgggaagcgccagatctccgcgttcaggccgaagcattcatcaagcagtgctggcgtcggaacaaggagtgcggaaaccttcgccggatctacatcgaagacaaggcgagcggtacaggtctaatccaggatttaacgaaggcggtaaacggcatgggcgagatcgtcccggtgcagcgcgataaagataaggtcactcgcgctatggatgcacaaccaatcatcaagggtgggcgtgtcgtgctgccggacaatcacccattcgttgcagagcttgaggcggagatgagcgcgtttacatatgacgattctcatccacacgatgatatttgcgacaacgtgtttgacgccgcaaacctggaaatgaacctgagcgacgatccggtagagcgaatgaaacgccttgcgggattgaaaaagctgggtcgctaatacataatgtgggcctgacggcccacacttaaacaaggttgaaatatgaataacattaagatggacgactataatcaaatctttaatggtggcgctggttatgcgtcaaccctcgcgtctatcgcggcaagatttggaacaatgtcgcaggttgaagagttctatcatgaaaacggcatggcgaagaaaatcgttgacgtgatcccggaagagatggtcgctcccggcttccagctaaacggcatttcagataacaccaagtttcaatctgaatgggacgggttaaatctggagccgcaaatcaccgatgctctttgctgggctaggctgtatggtggctcctacgtcctggcgatggttaacgatggtcgcgcattgacttcggcagcgaagcggggtaagccactcgaatctatcgttgtttacgaccatgattccgtttccgtcgcagaggaggaaaccagtccgcgaagcccacgattcggaaagcctaaaatgtacgaggtgaagccgctaaacggcgggcaaccgttcaaggtgcattatacccgtatgcactacatcgacggcgagcgcgtaaccaacaaggtgcgcaagctaaataatggcgctggtggctcggtgctgaacaagtcgattattgaagcgattcttgattacgactattcggaatatctggcgacgcaactactgaagcgcaagcagcagggcgtttggaaggcgaaaggcctggcgctaatctgcgacgacaaagaaggcgagtacgccgcccggttgcgcatggcgcaggttgatgctaattccggcgtcggaaacacgatcggtattgatgcggacgacgaagagtacaccgttatcaactccgatatttcaggcatcccggaattcctttccgcgaaaatggatcggattgtcgccctgtcaggcattcacgagatcgtgctaaaaaacaaaaacactggtggcgtaagtgcaagccagaacacggcgctacagacgttctacaaactggttgaccgcaagcgcaatgacgattacaagccgctgttagaattcctgttacagttcatcgtaacggaggatgaatacagcgtcgagttcgaaccgttgtcgctgcctaccgatgcggagaaagcggatatcttccagaagaacgccaacgcggctcgcagcctcgttaccgaccaggttattgacgccaacgaagcgcgtgatactctgtcggcgttgattcctgaactgaagctaaaaggcaacgctccgaagcagaaaaaacttccggatcgcgccgctggttcaggcagcacgcaaagcgcagagatcttaaacaacacggaggcggatgatgaaagttaacggcagaatcccaaactggcgttatcctgaagcaagcgagcgggagttatcccgctcaatgcaggacgcggtgacagaactcgtggtagaaatgcgggatcgcttagaccgccttaaatttgacgccacggctgaggaaatcagccaggcggaagacgatatcagcgaatctgccatcgtgttcttttccgccgtaattgcggcgctttcctccattgggttgactatctatagattcaattctaaacagtggcttgcaattgcgatcgcggctggcgggcggaacaacgaatcagttatgcgccttaaagaattcggtgctggtgggtatgaagactggtatcaggaatcgctaaataagtggcaggattacgccgaagcgtcaatcaggaagttagcaagcgatatagttgctgactggacaacgaaagttagaaccgccaacaacattggcaagtctcgcaagcagatcgatgaaatcatcgaaggtcgatacgctatctatggtagttggtcgcgcaaccgggcaagcggaatcatcggaacttttaacagtatgttgatgatgcagcgcctaaaagatgctaaagtatcgcattacttttggttcgggatgatggacgaccgcgagcgcgagagccatatcaagctagaaggtaagcgacgccccgttaatggtgacggaatcttccccggcgaagaatacggttgcaggtgctgggcggttccgtcatttgataatgaggatgattgatggttaactttaatgattactttaatcacgtaggaaaggatctgatatggaagcgagcaacatcaaaccgcgtaaaagttggtgatgttgccgggtggaaagatgagcatgggtatgtatacattagattcatgggcaaactgcgacaagctcaccggatcatttgggaaatgcaccacggcccaataccagaaggaatggaaatcgatcatattaaccatgtaacggacgataacaggatcgagaatttaaggcttgtaaccagaaaggaaaactgtaaaaacgtatcaatgagcgtaacaaataagagtggagttgtaggcgtgagttggtgcaagagaacaggtaaatggtttgcatccataagggttgataaaaaagagcgattcttaggtagatacgaagacaaaaacgaagccatttcagcaagaaaggcggcagaggcaaaatacaatttccataaaaatcacggagataaaaaatgaaaagagttcaaaggttcgacacggtaaagatgaaggccagattcgatgagaacggctttctggttgatactccgatcgtggcgcgtatcggtgcgcagacgtaccagacgccaaccgggcagcgcgtcgagttccgcccgcgttcggaggtgttcgatgctgaatcgctggcttcataccagggcaagccgatcactttgggtcacaagatggtgaacgcgcagaacgcaaaaggccttgtcgttggctcgtgctccggcgctggcaaagaagatgggattggtgttcttgttccggtgatgatttacgacggcgagtcaatcgagcaagccaaaaagcgcgtagctgctgagttatcagtgggctacacttcggtcgatatcgatcgcaaaggttggggtaataacgcaactggcgaatattatttcgatgaagaccttccggaaaacttcgaagagatgaaaaatgattccgtctctgattgggttcgctttgatgcagtgcagacgaagattcgcgtgaaccacgtagcgctcgttttccgtgggcgtgccgggattgcgaaattaaatcttgatagcgaacaagaattcccctatgatgacgactcaaaccacaaaggagctaaaacaatgatcattaaaattgacggcgtagatgttgaagtagcagataacgttggcgcttacattgcaaaactcgacgcgcaagttgcatcggcaaccagtcaggtaacgagcatcaccgcagagcgtgacgcacttcagaccaaagttgatggcattgaagatgaagtcgccgcccgcgttgctaaaatcaaagccgacgaagacgcaaagcagaaagttatcgcggttgtttctgccgctggcgtcaagtgtgacggcctggatgttaaggcaatgaaagttgcttacatcaaagaggttgacggtcgtgatctgtctgataaagaagattcgtacatcgacgcttcttttgactttatcgccaactctgataagatggctggcaatcgctccaaagtcttcggcaaaaaagaagatggcgagcaaaaagacaaaggcggcttaccgaaacttgacggcaccgaaatcatcgatccgcaggcaaaattccgccgctaataatttgcggccttcgggccgctaccagaccaaataaacaggagattcaaaatggcacagattccagcttcttattcccgcaagcgtgatattgccgtagcggggcagatcgctgatacgtcgctttataatatcgacggcacttgcgttgctgaaggcgatatcaaggctggcgtactggtggcttccactggcgtagtttccaatggccataaggtcgttaagccagcgaaagcagcgagcgacgtcattgtaggcatcgcgcagttctcgcaagcctactcgcctgaaggcaagtatgacgatgagagcgcggttaacgttatgactcatggccgcatttgggcgatcgcggacgcaactgttactgaagcagattgcgtgtttgattctttcgccacctttaccgcaaacggcaccgtagcgaagggtgatgccggggttatcaaaactggctacaaacacactggcgaatacaccaagaacgcagatggcaccgttctggtgaaagtgcaggtgcttcagggcgccgttgctccagcggctgcaactggcggcgctggcgtataaaataaggggcttcggccccatttttgcaccagaaaaaaacctttgacggcttaacgattcgtgatattcttcatctcgttaagccaaatacacaaacaggagtttttcagatgactatgaaattagatgcattcgaacagagtgcaattaaggtcgcaatgcagggcatgggcgtcgatgccgcaaaactggatgcttacggtatctggactgttaagcagatgactcaattactgaatcgccagtatgagcaggcatacccgcagaccagcgcacttgagcttttcccggtaactaccgagatctcgccgaccgcccgccgctttgagtggctcgaattcgacggcgtaacctctgcgaaaatcatcgccgattacaccgacgatctgccgaccgttgaagcgatggcaaaagagaagtcagggaaagttttccgcctgggtaacgcgtggtttatttccatcgacgaaattaaaactggtgcagcgctgggttcaagcctgagcgatcgaaaagcaaccctggcccgcgaaggtcatgagacgctcgtaaacgatctggtgttcaaaggctccactcctcacggtatcgtgagcattttcgaccagccgaacattaaccgcatgaccgccagtgctgcatggggcaatgattcagcggcggctgaaaaggcattcgaagatctggaagacctgcttaacatgatcgaagaaaccacgctgggccgccatcacgcgaccaacatcgtgattcctccgtctaagcgtcgtcttctgacgaaaaagatgccggacactagcggcgactcttatctgacttggttcaccaagaaccacccgaacatcaccattacggcgatggcggagttggaagatattgacggcgcaggcaccaaaggcgtgctggcatacgaaaaagacccaatgaacatgagcatcgagatccctgagcggttcaacatgctgccgatgcagccgaaagacctgcatttcaaagttccgtgcacctccaaatgcactggtctcatcgtgtaccgcccgctgactattgcgattctcaccgggatttaatcaaaagcgccttcgggcgcttttttattgcattgcattctgcaatgtgctttaatttgaaacctaaagtaaaccaatggagcattaacaatggccagtaaaaaagaaaccgtagaaaccgtagaaaccgcagaaatcaccagcgaagaacagacgccgcaggttgttcaactgcaaaacgttggtgcatgtgcaattcgctataaaggcacaaattacgtctatgagcaggttttcgaagtgccagaaagcgagatcgaccgattccgccacgaaatcttcaaaggccgcgtcgagttctacgacaatcctaaacgcacgcgcgaatacatcgcagcggtaaaggcgacagcgaaagagatcgtgcagcctaaaagcgcggaataacaaaaaccaacaaagggcgcttcggcgtcctttttcatatcaggagagcaaccatgaattacacaattcaagatgtgatcgataaaatgcgcagccttgcacctccgcttaaagaagttccagatgaactgctgtctgcatgggttgtgcttgccgaagaattcgtttgcaaatcccggttcggagactccatcgttacggcgatcgcgttgatgaccatgcatctaatgtttttggacggcgcaatgaagcaggaaggcgaaagcctggaatcttacacgcagcgagtggcgtcgttcaccctgaccggggagttttcccaaaccttcgatcgcgtgtcggcgtcaagtgataacgaaatgctttctacgccgtggggcaaaatgtactggcgtatgctcaagatgcgcggcggcggcttcggcctgcttaccgccgggaacgtgcgccgctgcggaatggttaggtgatcgctatgaactacaaagcaatccaggcacgcgcaagcgctggcattaaattcttcagcgacgctggcggcgtgttcaacaagtacacgaaaggcgctggcggaggaatcgatccggaaaccggggaagatatcattcctggcgaggtggtgacgacaatcaagggagcgatcagggatgttaatgaccgtgacattaacggcgaaaccatccttgctggcgataagcgcggttttttcactcatgatgtgccaatcatggaaggtgacgaaatcgaagtagacggagagcgctaccgcgtggttaatgcccgcccggtaaaaccaacgggaaccgtcgttgcctaccgtccagttttgcgcagggtggcgacttatggctaattacactatccgcgaattcacaggcgcaattgatgcgtggtgtaaggccgctggtgatgcgctggaggacgttgtaaggtttacgtgtgaagatattcaccgcgaccttgtaatgcgttctccggttgatacagggcgcttccgtggtaactggcaaatcacctttaaccgcgccccgctttacgcgattaacgcatacgaccaaactggcgaaaagacaatccagaacggcaaagccaacattgcactatacgcaaaaggggccgggatcacttcgatctggttcagtaacatgctaatctatgcgaacgcgctggaatacggccattcaaagcaggctcccaatggcgttatgggcgttgttgcgatccggttgggcgtttatgttactgaggcaatcaagcgagcgagggcgaaaaatgcattatgatatggcgttaaaatgcaaggcggcagtggctaaatttgccgccgagaacgggttgagggtcgcgggggataacgttgactttatcccaccgagaggcggggaaacctaccttaaagtctcctacgtcgaggcggattcaagatcggttgacctgtcaaggaaatgccgagtctatctggcgatggttcagattgacgttatctttaagcctggaatcggaaccgatcgagcgaggattatcgcccaacgcgttgcaaaatccttccctgaaggaaagattgttgatcgtgacggtaagttatatgtgagcgagtgggcggaggtacacggcgtgcagaagcacgaaacgggttggttcttcccggttcggttcacagtaagatgcgaccgcacggaggagagcggctatccatccaactagcggaacctcacgtcgcttataatttcttgccagcctggaaatatgtaggcataatggcggtgtaaaactttcattcaaacaggagtattcaacatgcatttaccaaacggtgctaaggtcttctttgagaaggctcgcggtgcgaagattccgtttaccgcaatgaccaacgacgcgaaaaacccaaaaatcacggtggcagatggcaagctgaaggtgaaagatattgtgatcttcaccgattgcacctgggacgacttcgttaacaaggtggctcgcgtaaaagcagtgacagcaggcgtggcaacgctggaagagttcgacacctccgacactaacaagtatcctggcggcgcggctactggtaacgtaagcgtgatcactgattgggtggaattgccttgcattcaggatttaggcaaagatggcaacgaacagcagttctataactatcagtgcttgagcgatgagcgcgaacaatccgaacctacttacaagtcggcagtgacgcttaactacacgtttgcgcacgattacagtaacgcgatctaccctgtgttgcgttcagccgacgccagcaagcaggcgagagcgatgtacatgtatatcccgcgagcttccgaggttcgttactggtctggaattgcatctttcgatgacattccttccacggctgttaacgagatggaaacggtaacgcttaacattgcgcttaaaggtgctcacgtcttccttccggttgccgtgtaattaaatggcggggcttgtgcctcgcctttttttgtgcataatagcgaataacacaaaccaatcaggagttaacaaaatggctaaattcaaaattcaaatcggcggcaatctcccttctttcaagctgcctgtaaccttcacttgccccgacggcaaagaagcaaccatcaccatgacagtaaaacatcgttcaaccgatgagatgaaagacttttatgagagcgaagataaagcgccaaagggtaacgccgagtttatccgcttcatggctgaaggttgggatctggatgacgaattcagcgatgaaaacatttcctggctttgcgctcacttcccggcgttcgtcatggcactgccacaaacttacatggccgcgctggcgggccaccgtgcaaaagtttaaggcgggctgtttatctcacgcttcagcctgagctaaccgatcgccagcttgcggagtacgggttaaggcgatcggattatgaagcagatcttgaaacgatctactttgatgaacagaccgcccaaagctggcagctattccaggccatgcaaacgcagtggcgaatcgggatgaatggcccgacggggcttgactataatacgttgcctatgctgttcgaattgtataaaatcgacaatcgagaagcggcattacttgacttgcaaatccttgagggtgaatacctgaaggagatttacaagaaatccaaataagcgcctactggcgcttttttcatatgggggcgaaacatggctgataaagtagctgggctaacgtttggcgttgacgtgtcgcaggttgataaagcggtacgatcactcgcagaactgaaaaaccaaagccagcaaacgggcgctggcctacagtcacttgctgacgctgaaaggcgggccacggcgcagaccgaggaaatgaaccgcgcattgcagcgccagaagcaagagactgacaaatcaaaaaccagctttagcaggatcgcaagcgccatcgatcccacgatcacaaaaatggccaacttgcgcaaagcgacggaagaacttgataaagcgtgggcgcttgggcttgttcctgacaaggaatttttccgcctgggagccatcattgaatccacaaccaacaatctacggcggcagcaggcggcgctaaccgaagaaggtcgcgcagcaatcgcagaggcggaggcaaagcagaaggcggcaaatgccgggcgtgattttgtcgccagcctgaaacagcaggctgactccatcggaaaaacacgcgccgaactgctggaaatgaaggcggcgcaattgggcgtatcggcagaagcggccccgttcattaacgcgctgaaacagcaagagcaggcgttaaagaaacagcaaaacgctatgggcctggctggcatttctgccgggcaatataaaatggccatgcgccagttaccgatgcagatcacggatattgtaacttcccttgcgtcaggtatgccagtctggctggttgcggtgcagcagggcgggcaaatcaaggacagcttcggaggcttgagcaatacgtttaaggtgttgttgagctacatcaacccgctaacggttggtgctgcgtcgttgggtatcgccctggcggcaatcgctaaagctggttatgactcctggagtgcgcaacgagaactggcgaatgcgctggtgctgactggtggctatgctgcgaccacaaccgggcagatcacagccttaaccgaagagattaacaaaaactcatcggccacgattggcagcattcaggaaatcgcaacatcgctcgccagttctggtaagtacaccatcaaccagattaagcagatcacgaagactacggcggaatggtcggcgcagacgggggagagcgagaagacgatcacagggtattttgatgccatcgtaaaagaccctgttaaggggcttgccgatctcaatgagcgttttaattttctgaaagagggccagctaacctacatcgaatctttgcgtaaaacaaaaggcgagacggcagcagcagatgcggcgacaaaactgtttgctgatactatggataagcgccttaaagatatcgcggacagtgcaacgccactcgaaacgatgtggatggatattaaaaaatgggcggctgactcgtggaagtgggtaggcgatcacacggtaggggcgctaaaccttatcgttgacacggtttccgcaatcatcaacacgatcagaaagctgattgccgacggcgacgccatgatcgcgcagttcatcgttgacgctggccgacagctacagaagatccccggcatgggagactttgggaatgactttctggcgcagcaggagcagttaatcaaggactcgaaagccaaatccgccgagcttgcaaaaaccattgcggaacagcaggcaaggatcgcaaaaggcgagatgggttacattgacgccgcgaaggataaaaccctttccggtgggtacagcagcaaaacgaaggatcgcgtaaatcaggaagaaaaagatatcctgaaaaaccgcaacgccaggaagcagcaggtagacgcgggcgttaaaattgatgagcagtatcaggctgaactgctatcgctacaggcgcagttaaaggttttgcagcagcacaaagggcttgatgacaagatcagccagcagcgcaaagactacttcgagacggttgctaaattccaggttttggaagaggcaagccagaagcgaaaactgacccaaagcgaacagcagatgctggcgaacaaaaagaatatcctgtacatggcggagcaaaaggccatcgtgggagatcagattgttcagcagcagagattgaacgccttgcttgacaagtcgaccaagtatcaaaaccagatggcggagaaaaccaaagcgctacaggataccgccggaatgggtagcaaggagcaggagagataccgggccaatgcgcaaatggcggctgactggaaaaacaacggcggatctttaagtgaccctggatttaaagcgatgcaggccgcaagcgataaattctacgcacagcaagatgcgcaaatgatgaactggaaggccgggttcactcatgcgtgggctgatattggcgacgaagttaatgacgtatacaccaacatcggggatatcactaaaaacacatttaacggcatggcgagcgtgctgactgattttgtaatgactggtaaagccagctttagcgactttgcaaagagcgtgatcactgacattaccaacatgcttatcaagatggcgctgtttaactcgctttctgccgcgtttggtggtggcggcacgttcagcttcgccaacatgttcagcaagggattttctggtggtggctacactggcgacggcgggaagtatgaaccaaaaggcgttgttcacggcggggaattcgtattcacgaaggaggctacgcaaaggttaggcccggaaaacctgtaccgactcatgcgcggctatgcaagtggcggcctggttggtggtaacgcaagttccggatctggaatcaccaacggcggcaacgtcgcagcgtcggcggctatggtgttcactatcggtgacattaacattacgatgggttccggtcaggatagtaaggggatggagcagggcgtaaggcagatcgtgaacgatatgttcaccgaggctttgagccaaaacgggcgcattgcgaagttcgtcaatgagaaaacgagggggtagtagtggattcctttaaatggtgtacacaaattcaaggaggggcggcaaaggtagccgtctccaacaacattcgatcgatcagtttcggaaacggctatatccaaacggcgtcgagcggcattaacaccaagcgccggacggttccgatcgtttatggcggttcagattgggaggaggtttataacttctgtcaggatcacgtaaccaagccgtttgtgtggaaggcacctgatggaagaatgggcgtattcgtcgtaactgccgactccgttaaccttgcgccgcatggtggcggcgtgtttgaggtaactgcggagttcgccgaacgcttcacttcagccggataatcaaaagcgccctttacgggtgcttttttttggcctatgatctggagtcaattagaggagggcttacgatgacagccaacatttcaaaagagtttacgaactgcttacaaaaacttttccccggcgagatcctgacgctgatcgatatcgacgccacaaagttcggcgggcaggtctaccgattccataacgagaacgtcgcctatacaaccgaggagcttttagcggcggtgaacggcgggacgcttcagccaaaaatgatcacgtttcgcggcgagcaatacggcccgcgcccgttcggcctgggcgggatcgcaatgtcgagcgatggcacagtggaaaagccaacgttgacggttagcaatattgatgcgcaggcgagtgctcttattcgcgcctacaacggcctcatgcaagccaaagttacggtatgggttttggtcaatgaattgctgcaaaacgacggcagtgttaaagagggcgattttaggcgatttgtttactacatcgagcgaccaaagcaagtagacccgcaaaaggcaacgttcgaattaacatccgtgtttgatatggacggattgatgatcccggcccgactgacgcaaaccgtttgctattgggcgcagcgcggctggtataaatccggcaagggctgcgactacaacgggcagaacggatacttcgacaagttaggaaacagggttgacgacccgtcgcgggatgtttgcggtggcctggtgtcttcttgcaggcttcgttttggcaatgaaccgttgagtttcggcggttgtgcgacagcaactttgaagagtggtagctaatatgttgactccgaaaattaaaatgcagatcatgcagcacgcgaaggaagtctacccgcacgaatgcgccgggctggtaacgcaaaaatcacgcgtgcaaaaatatcaccgactagacaatgtttctcaagatcctgagaacgaatcaatgccggacgaaacgcagtatgcgatggcgtcaatggagggggagccgatcgccttcgttcattcccatactggcgacggggcgaccacgattccgagtgccacagatttatgcttttgcgatgagtctggattgtcgtgggttatcgtctccatcccggaaggtgatatgcgaatcattgagccgaaacgccgacctctgattggtcgcccctgggctttgggcgcttacgattgctatggcctaatcatggattttcacaagcgccacggcgtcacgctaaaagatcggcgattgccgttcgaatggtggaagccggaatacaaagagaatctttaccaggattactggcaagaggacggattcattgaaaacactggcgagcctgaagttggcgatatgatcatcttccagattcaggcggaaaagtggaatcacgcgggtatttacgttggaaacaataacatccttcatcacgcgtttggcaagctgtctcgccgggatatctattctggatggtacgagcagcacaaggttttaatttgcaggcacaaggagcttaaacatggcatcacatacaaagacgattaaactttctggttcccttgggcgtaggttcggagtattccacaaacttgcggttgattcggttgctgaatgtatccgggcgctgtcttaccaggttgaggggtttaagcctttcatgcagagcaaggttggtttaaatatgcgcttcggcgttgtcgccgacggaaaaccaatcagcgcgaacgaccttgcgacttttgccgtggcgagggagattagaatcatcccgatcccaaaagccagaaagaacggcgggttgttgcaggtcgttatcggagcggcgattatggttgcggccttctttactggcggcggctcgctggcggctatgggcgctttttcgtcggcagcattcatggctggcggatcgatggttttaggtggcgtaatgcagatgatcgcaccgcagatgggcggcaacatgcgggcgagcgaatcgcctgagaataagccatcgtatgcgttcggcgggccgattaataccacggcggccgggtatccaatccagttgccatacggttacagattggctggaggcgcattgttcggttcgggatcttacgcagaagacaacaactaattaagccattcgctttttagcctgggggcgtagcctccgggctttttgtcgtgtacaattgcgatactattaacaggaggctaaacgatgactaatatcaaggcccgcaagggcggttcaagcaagccacgcactcccgtagaaatgccagataacctgatctcaaaagataagatcaagttattgcttgctgtttcggatggcgaggtggttaacgacttcagcctgaagcagttgcattttggaggcgtcccggttcagaacgaggatggaacattcaactatgagggcgtgattgcagagttccgccccggcacgcaaacgcaggactacattcagggcttcagcgaatcaagcgctgaattccaggttgctcgtgaagtcactcacaacacgccttatacgcttaccgtatcgaacaaaaatctttctgccattcgctttcgcctgttatggccgcgcgtgctgactcaaaaagataacggcgatatggtcggatcggttgttgagtacaagatcgagatggcggtagacggcgcaagttatcagacctacctaactggcaaaattgacggaaagaacacgactggcggttacgatcggagcattcgcgttaaccttccgcaaaacttcacgtcgcaggtgcttatccgtgttagccgagtaactccggacgctgacggggtgaaggttgtcgatgcgttccaggttcaatcatacgctgaggtcattgatgcaaaattccgctacccgttaacggccatgctttacgttgagttcgatagcgatctgttccagaaccagatcccaaccatctcactcaaaaagaaatggaaaattattcaggttccgagtaattacgatccgattaatcgcacatactccgggacgtgggacggtgtttttaagtgggcgtggagcaataacccggcatgggtgctttatgacctgatcatgaatcagcgctatggtttagaccagcgcgaacttggcatcccggttgacaagtggtcgctgtatgaggtggcgcaatactgtgatgaacttgttcctgataatcgcggcgggatggaaccgcgctatttgatggatgtaattgttcagtcgcaggttgaggcgttccagttggtaagggatatttgttccgcgttccgtggaatgacgttctacaacggtgaaagcctatcgattatcgtcgataagccgcgcgatccggtgtacctgtttacggctgataacgtcgttgacggcgttttcgttcggacgttcccaagcgaaaagacgatgtacacgtcgtgcaacgtcatgttcgacgacgaagaaaaccagtacgagcaggatgttgaaccagtattcaacccggacgcagccatgcggttcggacacaacccgaccagcattacagcgatcggatgcaccagaaggacggaggcgaaccgccgtgggcgttggattctgcaaacgaacctaagcgccacaaccgtttcgttttctactggtctggaaggtatgattccttcttgcggcgatgtgatttacgttgcagatccgcactggcaatctgcctttaacctggtgctttcagggcgaatcatggaagtatccggtacgcaggtatttttggcgttccgctgcgacgcgaaggctggcgacactctgatcctgaataccgacgacggcaagcctgtgcgccgcacaatcgccagcgtttcggcggacggtaagaccctcacgctaaacgttgggtataactttgacgttgcgccggacagtgtattcctgatcgagagcgatcagcttgcagcggaacagtatgtagtaacccggattgaaaagggtagtgatgacgacgaattcacctttgccatcactgctacgcagtacgatccgaacaagtatgacgcgatcgacaatggggtaattaccgatggccgaccaacttcggttgtcgacccggattcaatgggcgctccgaaagacttaacgattagctcattttctcgcattgttcagggaatgagcgtcgaaacgatggtgatcggctggtctgccgtgcagtatgcaaaactgtacgaggtgcaatggcgcaaggatggcggtaactggaacaacgtcccgcgcaccgcgacaacgcaggttgatattgaaggcatctatgctggcgagtatcaggcccgcgttaggtgcattggcggcgggaatgtagcgtctccgtggtctgctttggctagtgcatcgctgaccgggaaagtcggagcgccaaaaggcccgattaacctttttgcatctgacaacgagatcttcggcattcgcgttaagtgggccatgccagaaggggcggaagacacggcatacattgagctttaccagtcgcaaagcggaaccgatcaggacgcaagcctgcttacactgattccttacccggctgctgaatactggcattcaattttgccagctggctacgtgaacttctataaggctcgaagcgtagacaggatcggcaacgtttcagaatggactgattacgctcgcggtatgtcttcgactgacgttaacgctatcacggatgttatcctggatgagatcctcgacagcgacgcgatgaaagaacttcaggagagtacgcaggatagcgcggcaaaactcaatgactacgcgaacagtatcattcaaaatgcgctggcgaatgatgcggacgttagaataatgaaaaaggagaatggaaagaggaaagctgaaattaaacatgcagaagttctcatcgcaaatgagacggaagccagggtgcagcaggttaaccagatctcggcagaattcaacgaaaacctaaatgctggattaactcaagttaatgaggcactagccaatgaaactgaggctcgcgttacgtcggaagaggcgctttcagcaaggattggagagaactccgcagcgctagatcagaaactagactcatgggctgacgttaatggagttggatccatgtatacaatgaaacttggactaaagtacaacggacaggaatataattccgggatggccatgcagcttacagcaagtggtggaagcgttgtttcgcaagttatgtttattgctgatagatttgctatcatccgaaatgctgagtctggagcgtacacgttgccgtttgttgtgcagaatgaccaggttttcatgaataacgcgcttattcaggacggttcgattaccaacgcgaagatcggtaacgtcattcagtcaaacaactatgtttcaggtagtcgaggatggtcaatagacaaaaacggaacctctgagttaaatgaggtaacagtgagggggacaatttacgctactgacggttggtttaagggtactgtttatgcagagcatattgaaggtgacgtgatgatcgcagagtcaaacacgataccattcaagacatattcagatattgatagcggagattatgaaatactgaaaattcatggagaaaactttgataggagcatcgatacgaacctgattatacaagtgaattctacattcaggaatacttttagagtaattgttcagactccagggaagggggaaatagaattctacagtatagacactggaaatgacggaggtacaagagcatacgcgctacgtggcttcgatttaccagcggctggaagagggcaagagaataggatcatcgttagggtaactcaaagcgggaggggtagcagcataaaaacattcactccatgggttgagagagataatggaaccactggacaagaaacgtctgatggagtcatatataacactggttttatcagagagagggcatacatatcggcatacagaaaaggaaatagaatagtagtctagtgacaaaagcgcccggctgggcgctttcttttaatatgaatcatagatgtaaaaaaggggccgaatggccccttttttcttttgttgtcttgatatgcttgatatgtcatatcgcaacaaagttgatgttgtttttgtaaactcagattgtttctacatgagttagtctttgcagaccgtagatggtgtgaagcgtagcaaatgccatttagtgtatcctcttgtcgcgtctaataatgaatttttagtgattacattactgtaaccagccaatgttattgcctgaacgcccattgatatcgagcagcaggttaggtatgccagcaccttttgcattctctggaatgccaaggttaattgccccacgcctggttgatggtgggcttggaggcaacagcgcatattgcggtttctcccatatgttgccgattagggttgtcagtgcgctcagatcaggggctgtgctccatgcgtcagaccagataatgttatttttgaggataacttgagacgctggcgcaattgttctggttcccgttgacagttgtgcaatgatatctgaacccttcatccacttgcagtagaaaatgcaactctccacagtcagcgacggaacagatgcactctcagtgtcgtacccatttgttgatatcaggcgacgctgcttgacgcttgacgtgtcaataaacacacaattacggacggtattattgaactggttgcggtggtgagatatggaacatgcgtcgtttgtcggattcccaatctgcccctgcagcctctgaattccatcgttgaacgcgaaacagtattccactacgttattaccactcccctgccgacgtgtgtaataaaactcaaagttgctcatcccggcaggtggagctgcctgtagccctgcgttatcagcagagacaaacatcactgtacgggcgcagccagtggagtaaacgtatctgacaacgttatcccaacacataccgtcaatatcaaccgccatgttgtcaggtgccattggataggagccatgcacctccagtttttcaaacataacccgattacaatgccacatccagaaaggtgcgtcatacgccgacactcccccagtagtaaatttatcccaacggtacgaactgtagtagcagtcacgaacgcagctctgccactcgttgtccgtataggcgtcgttcttactggcacaagtgtgaattaatgccccctcctgtacaatatttgtaaacgagcagcgtaaaacctttgctccgtaagtacgggcggcatccccacggttatcagtggtatcagatacccaggtattgccacggatatagacaccggcgttaaccatattaaacatgcagtcttctacagtcattttatgtgcgggattagaaatatctgcaccataaccgacaccaaaaagctgaacgtgcctcccaatcgtgtttttattcggattgcttacagagtatgcattacctgtgaaataacagtttttcacatgaacatcagcaaccccatctgcatcaccagtgcattgcaggttaacactggttgctgctgaggtaaacccgtcatctctgtccataaaatggatgttccgcaccgtaacgcgacgggcattccacgatgctagttgccccgcagaatttgagatggatagccattttggcggcgggccatccccgtatgtgtcaaaaaaactcatttcagacgacgtgttcactaacctggcattaacggcctccttcaacactgtgccgcgcctgattagaattgaaaatgggtagctggtgattgctgcaatagcagcagtaacagttttaaacgctgatggaattggtttattttcatcatcagaagggtctacatataagtattgcatttttagctcctgttaagctggttgaacgtgcagatcgagccaatcgaaaccgttaatgtttgccagtgtcccggcgctcgttctaacttcgatagtgaaggtattcgtgccctgagatacgatgttaactatgtacggaggtgttccgaacgaggttcctgagaaaccaacgggagggcaaaccttccagtggtctccacgtaaattgcatccgctgataacgtactgacctgttgatgggttggtgacagcaattctcgcttcatttcctttattcgccagatgatattcaccacctatcgcaaaaaccccgtctgataatttatcagatagtcggtcagtcacattcccggaaacgcgaactacagttcctggagagtaccgaacatcaccgttattcattttcacgtaaaaacgatctgtcgccattttctctgcgaacgaataaaccagatagtttggagtatctaccgttacattattccgtaagtcattatggtaaaaagtcaccacattggggtcagcaacattaatcggggtgaatgatattttttgcccatacgacggaagtcgcaggaatagtttcgctactgagttattttggtcattaaccaatcctaccgctggcgttaatgcagaatccccccagccagattggccgccatgcagcgcggtaactttcagccattgatagatactgccttggtcaatggacggggcgttattgagggcttgcgggttaaacgtgaccatgtaaacatttggcgtgtagttaacatagttgcctaccgacagaataccagagaccacttttgacccataccccgagtagttaacatcaaacaagcgataaagaactggtgataaattttcaactgtagggcattggtcaatcgttcgttgcaatgatgtgccgatgtcgaaactttttaccagcttgaacatctgcttatcgatagatgagccagtagggtatccaaggtcgttaaactggttggggctaaaaacgaaaatatcgataataccattatcgttagtggtaataagaaaacctgggcttaggtcatcagattcatttccagcagaggggaagcgaacaattttatcttcaaatccattatgaaaatatccagtgccctgcactattggtgttgaaatttgagcagctgataacctcccgtcaacaattgcatatgtctgaatgcgtccgcgctcgtctaagactaaggcagctttattattcggcccgccgaatactattccggcaacgcctgccgggtcgcctggcatctggtgaatttcaaattcaccacgcttaaatatacgctcccatactgacaggttaacatctccaacgctctctggcccttcacctgagaaaaaattaccaattttcatatatccgtcaggctgtgccaaaactacaagcgttgactgttcgccagcatcattgataatttgctgcacttggtctctagcagtctctgctgcaacctctgaagtttttgccttactttcagacgcagccgcagccgcagcgcttgattccgcagcttcggagtctgccttaatttggttggcaagattttgcaacgattcgaaatcgaactccttaaagaactcgactgcatccgcaattaccgtttcctgtgactgataatagcgaagagtttccgcaacatcttgagccaggccgtcaacggttagtgagtcacttaatagtatcgcataatcactagacgctacgacagcgccgtttgtggtaattgctttaatttcagtatcgctgacaaccttgtttactacggccatttgaattggtgacgacaaaaacataattgtcgctccagggcgaatcagcgaaagcgatgattgccactttgtgccagtgccagtaactgttccgtctgcggacatagccgctttgccttctctgtatagtgccatgcatttagtcctctttggttgattgagtaacgcagataatagcatcaatgcacagaaaaaaaaaggagcttttcggctcctttagttgttaaatcagaatgggatatcatcatcgaaatccattcccggattcccccagccgttttgaggtttaggcgcttgctgcggattgggttgttgaggctggccacacccggattgctgattgccgccgccgctttgcgcaggttcgcgctggctgaattcgagttgcggcataatcatttcgttgtggctgtaaattgtgccgttgtgctcgcggttcacgatctgaagcgtccggcaggtgacgctaatcaccttatcaatttgcagtgcttcgtcgtaccacttaatcatgttttctttggcaaagaaaacggcgcggtagttcgtgtaaaccgtttcgtcctggccatcacgattgcggatcttcattcgctccgacaggtctacggcgtacattttccacggcccgttattgttgctgccttccttgacatacggttcctttcggataacacctgttacaacatgcattgtcgttcctatggggcggtttcccgcccggttaaattagttgaaagatgaaatatcttgcgcttctggttcaggttttgattctaccttttccggctcacgtttcgcaacctcttgcggcttaccaggattgaagccgtttgccggggtgactttcagttctgcctggcgtttggtgatatcgtcttccgtcattttccattccgcaggcgttaacgtttgtttcgccagcttatagatctcacgaagcgattcgagatcttcgcacgcgtcaattcgttttttgaagtctttcggcgtcatcttcgtaatttctgcatcatcatccgcctgcttgatgccgagagctgcggccagtgcataacggcgggcgtaagatgttgttgagccgtatgcttgttcgacggttttactgatcggcatattgtactgaaacgccatgaactcaccgctttcatgcaggaacatcgtttcgaggtgcataaccttttcggtgctggtatccatcatggattgaatgaccataattttgtttttctcaagcgccggggaaatcgcgtcgaggatatccccaagatttgcataggtgttccccaggtggttgttcttcccgcttttcttcgcggcaacgaagccagattttgccttgattaatgctgctgcgatggttgtaaatttttcagatgtacgcatgataaagtttccttttcctgattggtaatgcgcactatatcacaagtgcgcaccagtgtttagctatttgtgccgtatacgtccgggaacatatatttcacgaactgcggagtaggcaaaacgacttccgccgcgtttgactcatatgatggccatgaatcatgcttcacgcattccgcatactgatgaatcacgctttgatactgcttgcgaccgatatcgatctgctggctggtcagggtgaacgcaagcggagcaaacggtgattttttctcctgcgttagcagtctgacaactaccgggcgtttttcgttgtaggtcttcacgaacagatcgcgctgcaatgccatcttgagatagtaaccaaggttgaaagcgagccgcccgaaatcgtcaggcttggaagattgcgttgttttgtagtcggtaatcaccacgacctcgaaaacttcatcagggttgaatccccactctttgattagttcgggatcggaaacaacgtcaacatgatctagtcgaaccttaaccttgacgccgaagatctcaccgaagatcgacaattcacgctgtgcggtaggtgattcgatacaggcggcgtgtcgcgggttggccagcatcacgctgcgcatttgaacaaccgcatcgaaatcaacatccctaaccagcttccgcccggagttcatcgcggcgctttcgtcgcatagttcaatcgcccaccaaacatttacgtcaatcccggcgcggtatgccatctccagaagttccgggtaatccttgttggacgtcccaatcaggccacacgctttcagcttcgcagacagtgccgacttcgacgtaatcagatctttaacctcgcccggagaagtcgcccgcaggtactcgccattaaattttgccgtctcaagcatacaggtatgcgaacaggttccgaacgccagcgcggcggtttcctcgcgcaccttgaatttccagtgcgccggggatgttgcgtaaatctcgccgaggcttgagccgctaacgtattccgcgcaccaggaatcaggatcgtgatattgctcgttagtcaattcactgcttgtgtatgccctgaaaattgcttcagccattgatattgctccatttgtggtttcgttgcgttaagtatacgcatgacgattacaggtgcaaggcaaaaagtgctattcgcaattggttaaaaaatgagcgaaatttacgtaagatttagtaagatgcatcttacgtgactttccccatacatttcattgagttaatgcaaatcggtaagatggtaagatccctataggtaaatatccacgaaaaatctggcgcgggatcgcaaagcaaaagacacgtacccggagaaaccttaccaagataaatatagagagatagaacaataataataatattattatttatcatatacttactatctatatatggcggatagttggttaaattttgcgcgaaatttacgcaagattcatcttactaaatcttacctaaagtggttcgaccagttgtaagccactgaatttcaggaataaaaaaaggtaagactgattttgctcaatcttacctaaaatctgatcaatatttaatcagagaagcgacgatgccttgtacaacttacgttcaaatccgagcttaaagttgtcaccgttcggaacgataactttaagatcccgatcgtcagcagccgccagcatatcccgatctccacgacggcaaactacccgcatttctcgcttaccttttccgcccttgcctttatacctgtacgccacgatctcgacgtttgaaggtatgatgcaggcccaaacgtcgcacttgaacgaactagcaatattgaagtgcatcgcctcaatccaggattgagcaaggtaaattggcccgttaccgtcgtcgctctgattggtcactatcaccgatccgaaggtcagatcgccagccaacatcttctcccgaccctcctcatcaatgaacagcatgttgcaatactcatcatctggcccatcctcatgcacgagttgcattggtagcgcgtgaattagctcctgtctgccgttctcgtgagtttttacgccaacctgatatgatttgatatactcattttcaatgccctcatagagcgttacaggcgtgctatcgacggcctccgttctgtttaaaactgccatcactctttcatgatctgccatctttccgtagtcatacccgttatcacgagctacctgcttgtttctcttgaccacgtattcttgcggaaccttgccgagatagcgcccaagaatgttgatgcactcgctatacggctggccgcttaacttcattaaccagccgatccccttatcagcaccgcagcctccacagtatgcgccgccgtctccgcgcgtttctaacttgtcagtccagcggaatcggtctttgcctccgcagttcgggcagtcctggtgcttgccgttgaagtatcgagagtggatgccgcaaatgttctgcaacgcttcgcgccacatgccagccatgtacggcaaaacctctttttcatcgtaaaaatccacgtcgttacctccaaataaaaaaacgcccacacgagaatgataacccggcaggcgtttagtgtttagacaaattgtgctatcggactacgcggagcatttcgcggcggtcgcatcggcgcgtcactggctttccgttgctgtcaaatcttaaatctggtcggcagaatgaggcgcggaatcctttgcaattgttccgtcggtagctcttatgtacgagataagcgccatcggctgagatcatgccgcgcttacgccactgctgaacaacctggatactaacccccaactcttttgccgttccagcgatgccaccgaaggcatcaataaccaactccatccgcgcagtcaacccggcgcgaacctcatccttcagcacgtagtaaccagtcggtcgcttgcgtttcttcttatctttcccgcgcgatgttccgttgttgccgttcaaggttcgcttatcaacctttgccatttgttccataatttaaccctcatagcattttttgttaaacatgataaaatgttccctgtattatacacgcaactatgcgaatgacaaattaggattgcccatgctcacaattgaacaacaaattgaagcctacgcagataagatcacgttaatacaaaagcgattcacggttggcaatatcgttccatacccatatcaggcggtggcgtatattgagacagcaaagcggatcgcaaaatatgaacatccgttttacattaaggcttcggtttccgccgggaaaaccatcatgatcgccatgctcgcagcgcagtgcaaggcaatgaacttacccatgatggttcttgctcgccaggccgagatcgtgaagcaggattcagaggagatcagtaacctcgacgttccgaactccgtttattgtgccgggttgggcacgaaggcggcatacttcccgatcgtcgtcggatctgaagggacggtggttaatggtctgtttaaaatgctgggtgactatacaccttcagttctggctattgacgaatgccaccaggttgactggcaagatttggcggaggcgatcgccaacaatgaatcgttcgagtacatgagcagaccgaaggataagccgtatcgcgtgaacggtgaactggtcgatgccgaccacccatacgacgaaaaattcgactacgtagaattcggcggcggtcgaacacagtacaccatcgtcatttgtgagttaatgcggaggtgccttgagaagacagggcgagaacttcgcatcgttggctatacgggttcggagtttcgcggcgtcattccgattttacaggaagacaagagccagcctggtttttggcgcgagcagatcaccgacattaacacaaactatcttgtcgagttcggatcggtggttccgacaatttttggtgatactgaatccgaagggttagggtatgacctgtcagaattccacggttccagtcaggacggtacgcaggattttagcgcggaagaattgcgcaagatggaaaagaaaatccatgaatccggcgaaatgacgaagctgattatgcaaaaggtcgtggagcgtgcgaaaacccgaaacggagttctgataacttgcgctggacagcggcattgcaaggaggcggcgagctatctaccgccggacgcaacatacgcgatcatcaccgaaaagacgaactcaaagaaacgcggcgaaattttggataaggcgaatcgcggggagattaaatacatcttccaggtgatggccctaaccactggcgttaacgttccgttttgggatttttcggtgatattgcgcaagatcggatcgcttacgttgcttattcagcttttggggcgaggtatgcggcttctaaaggactggcaaaaacagcctccttactcgtgggtgaaagaagatcaccttgtctgggattttgccggaacaatggatgaccttggccagttgtatttcgatccgattttggagcaggcgcaataccaaagacgcaagagcagcaagaacggccccaaaatttgcccggtatgcaagggagaaaatagcgagtacgcccgccgatgcatccacaaagacagcaacggcaatcgttgcgaatatttctggatatcgcagcgctgcgaagaccagaaagacccgcgaacagggaagattaaggtaaaaggttgttacgccgaaaacgatattgttgcccgccagtgcagatgttgtggggtgcagcttaaagatcccaacgacaatctcaccgggaagcattatacgcagaatgactggtatgatgttgtcgggttcgatatcggcttgactcgcaatcagtccgggatcatcttcaattacgtgttactgaaccatgacggcgagcggttcaccgccagggaaaagttcttcccggaatcagagaatcagatttgcggcaagttgtggcggcaaaaggcagtctcccagcacgttgacgacgcggtaatgcgtggcaagttgggcggtatgaaaaacgcccgcaagatcctggagtatgcggaatacttccgcgcaccgaagcgcgtaacgcatcgcatcaacggcaagaaggaagatattatttcacgcaaagattttggagacgcagaatgatcgcagataaaggtgattatctcgaatactacggcgggcctgtgaaggcttgtccgcttgagaaaatcgatcagatgaatagcgtttcgtggctgcggcacgaataccctgattatctgttctggcacacagtcaatgaaggcagcaagcacaaggcgagcgcggttatcgatcatcaaatgggattgcttaaaggcgttagcgacttcgttatcctgattggtttcggtggcaaatacccgttcgcagccattgagctaaagcgccagggtaaggcgcaggcgtcgccagtgagcaaggagcaaagggaattccttgctgccgcccggcgtcgcggcggattcgccgccgtggcctatggcttcgagcaattcaagattgctttctgcgatgccataaaatagcactttttgttaaaaccgcccggcgaaagccgggtatcatttccacatcgaaacgaagaatggagtgttgaaaatgaaaaagatgctggctttagttgttctgtctcttggtcttattggttgcagcgaaaaaccgaaaacatatgattgcggtggtgaagcgtttgaggtaactagcaactatatgaaagttgtcaagggtgaaaactctggcgttataattgatggcgctggcgaaaatcaatataaactgcttactccttttgggtacgctcattatgcagtcaacaaaaacactattgatgttagcgtgggcgcttttcacaataccttaacctgcgaggttaaataataatggcaaaagatatcgcagacaaagacactcatgacgcattcatcacgtttgagcaattggagcgcgaaacgtttattggcaacgcccttgccactggcggacactatcaagccgtcaggccagataagttctatcaggtaactggcaaccgatacgcaggtagtaaaacgccggatattgtgcgcgacaagtgggcgacagatcgaagtctgatcgcatacatggaagagcgttacggcaattacgatcttgatgtcgccgcagaccgaagcaacgcagtttgcccgaagttctacgacgaaaaaacggattgccttaaacgctggtgggggaaaaacaagcacatttggctgaatcctccttactcgtttccagatccgtttattctcaaggccattgagcaaatggagcacgacaaccagatcgacattctgctacccggcgacaattctactgcctggttccgtgacgcgcagaagatggccgccgaaattatctggattgttgccgatgttgaagaggatgattacgggaacaagttaagtcgatccggtcgcctcgccttcatcaatggattaagcgggaatccagtcgacaacaacaataagggaagtgttattttcatcatgcgcaagctcaagccgggagaggagcaaaagacactttacattccggtaagcgagatttgcccgtcattagctaaaaagcgtatgcgcaaacgtgggatctgaaaaatggaacagacagagtctttcgccgagtatcttcggatcgttgttgaacttctggacaagcacggcttcattgggacggatgaggaaaagttagcctttgctgacaccatcgacggaacctacatggagttcatggacaacggaaccccggtcgctgactggccagaaattcttgaacgagaattgattgagtttaaatcacatgaaggcgcggagtatttcgcaaaacagcactaattgctaaacaatacccgccgcgtgcgggtattattactccaccaaccaatcaggagcaaacgccatgaaaaccaaaaccattgcagacaccatcaagatcgtaccagtaaaagcgcaagtggtatcgcgtcaactggttaacctgtctcgcctgtgcatggccgactacatggcgaacccttcagataattgccttgatggtgtagtcggtgagatttattttcgcgctggttatggactggaaagcgtggccatgtatgagcaaatggccgaaggtttttgcatttacggtgacgaatgatgattgtcgagactggtcgcgctgccgtatggcagcacgcaaaagaagcgggaataagtgatgatatcgtgaagatctcaaagtatttcgatatcaaagatatatcaattatctttggtgggaagctcacctatctaaacgagcgcccggtgaagcgcacgcgaatagcagtggcaacgcgtgcggaggccgacgcgctgaagatgttcatacatgagtcgaaacagcagaaaaaatattacaagtagcgggggcgtgaagaatgcgatatattgcgatcctatttacggcgatcctgttcacgatcgcaatcatgaactgcgcaattcaattaggataaattatgttaccgaaaatcacagacgaagaattcttagccgcccgcgaggaaggtaagacctaccgcgagatcgcggaagagttcggcatgaacattcgaagcgttgaacgtcgtggcgttcgcctggcacgacaaggacacctacacggaaacgcccacgtttcgaagcatatcccggacggcttcggcgtcaaaggcacgtcgacgatgattcgcgcggacggctccgaggtcgttcggtgggtcaagtcggaagtagacagagatcgcatggtcgcgcttatggaggcggcgcaggcggctttctgcgaagaccttccgcgagctgaaccgcaaccgctggatgagtcgaagttctacattgaagatcagcttgccctgtacccaatcttcgacctgcatattggggctatggcgcataagcatgaatgcggcgagaactatgataccagcacggcagagaaggttctaaaccgcttctttgattattccgtgtcggtggctccgcaatccaaaaaggctgttttgctggttggcggtgacttccttcacagcgacggcctggacgcagtaaccccggcaagtggtcacgttctcgatcaggacagccgatacgcaaaacttgtttatgttgccatccgctcgctgcgtcgcgccgtgtcgctactgcttaacaatcatgccgaagttgaagtgcaggtaatcgaaggcaaccacgaccaggccgggatgatttggctacgcgcagcgctggcggcgttctatgagaatgaaccgcgcgtttttgttgatgttagccctgcgatcctgcatcgcaccttgtggggcaaaaccatgctgggctacacgcatggccacacgatgaagaagcctgaaacgcgccttgctgcgatggctaccgacttccgcaaggagttcggccagtgcgactacatttacacgcattccggccactggcatcaccagactgtaacggaacactcgttaggtattgacgaggtgcatggccagttaggggccaaagacgcttacgccgctcgcggtggttggcgctcctatcgccaggcggcggttattctgtacagcaaagaatatggcgaagtaggccgctttatctaccgcccgaacatgtaaccacaacggccccgcgaggggccaacaaggaaaaccgatgaatagaaatatctgcattttcgatctcgatggcacgttgtccaatggcaaccaccgcttgcacctgctgccgaaaaaggatctccaccttacagaaagttggagtgaatttaatggtgcatcaattggcgacagcccaatccaaagcacaattgatgtagcgaatgcgcttcatcgctccgggatgattgtcgttatcctgaccgggcgatccgatgaggtgaagaccgaaacaatgatttggcttgaccgttacggggtgaaatatgacaggctcatcatgcgtcgcgccagcgacaaccgtaaagacacggtaatcaaggaggaggagttacgcaaaatcggaattgatcgcattgttgcggcatgggatgattcacccaatgttattgcgcacttgcgcggcctgggtattacgacttaccaggtctgcgactacggagacaatcttcaagatcatttaaaatcgcacggagtagacaaatgaaaaatgtaattattctcaacggagcacccggaatcggaaaagataccatcgcggaaattatctcgcggaagtgggaatacaagaaccttagcttcaaacagcctatgtttgccatcgcgcgtgctgtgcttggatctactgattttgcacgctttaccgccagataccacgaccgcaagcacaaagaagtgaaatgcgattttttgggcgaccgttctccgcgtgaattcatgattcacattagcgaaaacttcgtcaagccgaccctgggcaaaaatcagttcggcaagttgctttgcgattcagcgctaacttcgccgtttaactgcatcgtcagcgacggcggttttgatgaggaggtcgagcacgtcgcagcgcatgaggcgcttaacgtatttgtcgtccgccttcatcgtgacggcatgacctttgagggtgatagccgcaaacacattcgacgacccgatctgatttgtgacacgtatcacgaacttgattttgatatgaccactggcgagcctgaagacgacgcgcaaaaaatccttgatatggtttcagatgttgcattaaaattataaagttaatgcctttattatcaccaccttaacgattgggaaccttgacgggttcccttttttttgttcttaattttgccaaatgaatatatcatcaccttaccatttaactaacagaggttgcatatcatgcgggaattcatcaacgcggcaaccaatagcagcggcggtgttgcccttgcgggatctgcatccgggcaattaatcattgctgccattggtttatttttcatgatcttatttggctcaatcggcacgtggctgaagtggaaagactcaaaagccatccgggaggcgattgattctggcgacattaaagaggcattgaggatcaggagcaaataaaatgggaatgaaaacgcggcttactttcgcggcggcggtggcgatcgcggtcgcgttcctccccgaagtggaggacactaaatacacggtttatacggatatcgctggcgtaccaactgtatgcgaaggaatcacaggcccggacgttatcaaggggaaaacctatacccggtcagagtgcgacgcgcttttaaccaagcatatccaggtagcaaagcgaaccgttgacagcaaaatcaaagtagatgttcctgacaccttcagggcgtcgatgtacagcttcacgttcaacgctggcggcggcgcatattctggcagcaccatgctgaaattaacgaaccagggccgattgcgcgaggcgtgcgagcagctatatcgctggacgtactaccgcaacccgaaaacgggtaagatggagaagtcaaaaggcttgcataatcgccgggttcaggaatatcaactatgcattaaggatctaaaatgattaaggtaattggtgtggctcttacggttgttcttctgtctggttgcgcttccagtgtcccgatcctttccgatctggtgggcagcaagccggatatgacggcgcaagtaggcgcggagaacgttaaacaggcggttggcgtgacgaacaaaacggacacgtcaagcaagcaggagactacgttcaaagagtcggcggtaggaaaggttgacacgtcgaacaaaaaatccgtaacgacctccagcattcacgccaaccagatcacggcggacaagatcgagatccgaaacgatgaaagcggaagcctgactccgtggctgattggtggtgttggggttgtaatgctggcgataggtgcgttcggtctttggcgggaacgaaaaaacaaaggggcgtaatgcccctttttctatatgtaccgcttgacgtgcaatagcgctactccgtcttcatcgttaagaccatgttcaaccgtgttggttgcagccattccttgatagagcaagatgagcgcggcacgcaagtaattttctggtgtgatctgtttcacacaaacaagcctgtgaacttccgttatcagatcttccacctggtttcccgaaaagctgttcatcactgagttggtcaaggtgcatcatctcccatatgtatcggttatccatcccttcgaacgaccggaaatcaaaacctatttccctgttatccggccccgtacaccacacagagccgttttttccgtcaaggtatccattcgtatagcttcgcgctaaaaactccttagagaccattgaggcgaacatacgttgcgatacgttggcggcttttgccagtcgaggcgcttcgcggtgcgtatagacgaacttcgcaaaatcctgccgggtgaactcccggcgagattcgcagaacttgtaaatgtcaagaataaacatcaattacctcatgaacgacgggttgataaagacttcggaatccatcacgcagataaagcctaattcctccatcttcggcaataagcgttccttaatctttttgctcaccccggcctggcctttgaagatcttcaggttgcggcaggcgttataaatgccctggacggtcataacaccttttgcctgtttgcagcgactggcgataacgtcatacatcgctttaatttccgctccctcaccagcaaagccggaagagtcagccgacgacaaatacgttttgctcaattcatggaacataatgatcgcttcgtcaatggtcgccgtgtcgatcttcttcgagcgcttcccgccgggttgccagttccggatcgtgtgaatcacggacgccagacgcataacctgcttatcaaacttacccatcgcgccgcgaagcattgtatgcgaatacttgccgccgtcgcctaactccggttctaactcctggcgggccttgttcagcctacgcattgccgcgtcagtaacctgcaacttaatgttcgactcgctcataatgtcatgaatcagccggaagtaatccgccttcagtgactggtcgatcggctcataggtcgaattcccgttttcgtcgatgaacacgcgttcacccaaacgggtttgctcacgaaccaaaaggaagcgttcagataccccgatcccgcgagagccggcctgcataatggcgtcgatggtttcatcctgggcaattacgcaaatgcagcccaaagcctcgaatgacatattgttgctaacgtcggcacgagcgatcgatacgtggcctttatcccatgctttgagcaccagttcgctgttcgtcttcttaccgccatcgtttccatacgtgatccctaaaaggctgttaaccgccgtcgcctcatcggaaataacggcaaagtttccctgtcggttgttaatcttcgccagaccttccggggtggtatcagataccgggaaagttaggtcacacaatttttctaacttctcctcaagttcgtcacggtcttcaaaaagtttcaccatatcagattgcgataactccccttttagcgcctgcttgttggcggacagcttcgccatgattttcttacgctctttctttcgagactcgttaatgcgttcgacttcggcgacaataggatcgatggcaagcgagttaatggcagacttaccagcggaaggcggctgcgacgtgataacgtaaagcgttgtcggttgctcgctgccgtggtactcgacccaaaagcggcccatcatcgcggcggatacggttccgagaaagtgcatgtaagcggatgattccgggaactgaacagaacgcgctgcatttagcgccagcttgccgacaacatcataatcattggcgatcgagattgttggatacttatccgcgtttacgtcgatatctttgggctttggccagaatgaaacggagtcacgatacccgttcgcacgaatcgcaacgcgcaggggactgatcccctccctttctgcgatggcgataatatcttgcggtgatacgcggtcatttaaaaacatgcccttgctcctgattggttaatcgttcggctaatcatatgccgtattaaatccgagatccagtgataatctaaacacgcttgaaaaacgcgcttggattatcggggcgcatggccccgaacccgtcacaggtatttagcttcgaaagtcgttccgtccgatacactgaagccaacttcctcgcggtacagcgtccagcggcatccatcacgatcgaagatgtatccggcaaccgcgccgagcgcacgaccgctttctacctggtagcgcttgccgacgctgaaggattttttcatcgggttgctatggtcaaggccgacgcattttagcgttttggtttttagttcgatgaacgtcgcaatcacctggccaccagcgccagcaataaacaactcgccgctaacgcctaccgacaaaataacgcgcttcttcttcagttcgacgctgtcatataccatcattgacacattgccttcatcgtcgacgcgggcgggataaaggttattttcgtgtatattaatagcgcggcttgacgtgcatttaatcttgattgacttcgccatttattttctttctccgatctcgatgtacaggtttaccaaatccagaaagtcagccttgcttttgcaacccaacttaaagccaacgtgcgactcaattttattttgcatcgcagccagtgttgcgccgccattattcatcctgagaacttcgcggcatacttcggcgagcttttgagatatcatttcttcaccacctttatttccatgccttcgcaagcgctcttgatatcattaatcagacgattaagccttaaatcagtcattacatggtgatgacgtatatcaataattccagcaacgactaacagcatgacggcaaagataaaaccaccaggcccggacatacacaaaacagttaacatcatcaagataataaatttcatttccgttttactccgttgcgtttcgatggggtgattctacccgactttcgccgggtagttttagaaattcgtgctattctcgataattcgcctggaacacggcgcgggcaaaacctcgcggagtaatggaacgcagcattttagtcctttctgaccttccacccaaaaacttccaggcccaaaagaaattcacgccttctactccatccggcggcgtgagccgtttcggttcgacaaaaccgtttccgtgccatatgcacgttttcttcgtgtaattgtcacagtggggcattttgggatgccacacaggctcgttcggagaaacatagccaccgaagtcgcgcggatggaaataaaaatccggctttcgccatagtgacgataatttcccgaccgggttttcgaccatccaggggcaaccatacttattgcctaattgctcgaccatcttcgcatcccctgctgcggataatacgtcattatcttcccttacgtgcttgattccgctatgcgctaacagcgtgcatggcgggaaagcgaaaatgaagtcaggatctggaatgccgagaatcgatcgcttaacgtcaaaatccttgtcaatccaaatgttaacatactggatatttgggtgaaccattcgaatgctatattctccgtggtcgccggagtcggcgttgaaacagtacaccttgcatcccttgatggcccacggcaggcccatgatgccggagccgtcgaacatgcagtaaataaccttttctttcatgctttccacgcctcaatgaacattctgttcgattccagcgtcagcgtgacgccagccagggaggactgaatgagacgaccgcccggaaccgtcccgatgatgtagcggcctttcgacttcgtgatcgtgatctgagtgaagccggaggcgcggttcatgcggagaacgacgcggccatgagcgttcaggacggcgagaatggaatcagtcttcggatggttcattgtgtagctccttcgtttgttggtatggggacagtatgccactatcccgctgtgttgttttagcaaaacgtgctattccggaacgcaggtcgcgtaatcctggctgatgtagatcgtgcgctgaacgcgaggttcgagatcaccgagttcctggatggtaacatcgttgcttcctacccggcacggaaccgatccgaaaataaactcgccagtctgcttgtcgttgatttgccatacattaccgccttcctttttgacaaccaggaaaggcgcactgtctgcactgaactcttccgggccacgaccgtagtaatgcgtgatcgcagctttggccgcagcgctgaaggcatcggtaacgtcattggtcgccttgtctcggatggccttgatacgttcttcaggcgatccgatgatgtaggaaaagctgttcgaaatggtaactgttcgcattatattttaacctcgttttggtggatgaagtcggcgacgtaatggcattcgatcgggttctcgatacccgccagcacctcgcaagacccgttattcagtagctggcaatgctggcactccgcaccgccaacactggcaatgacaatggcgatcccgttgcatgaaccgccgaacattcgatgagggaagtggtaagcatcgcaggtgcaaaccacctccccggcccgccgtttcctcatacctggcccttctcgatgcagaaaacccaatcacgagcgtcaaccgcaaagcgtgcaacgccgtcgagcaccacgaagacagtaaacccgttgacgccgcgacccttctcgatatcggtcacggtgcggaacagatcgcttgcgccatattgaattttatccccgacgactacatccgcaaatgctttcatggttaatctcctgactggtttcgatgggttaactataccaggcctcgcggcccggcgtttagcaattcgtgcttatttcactgctttcttcgctgccttgtacgcctctttgaaagccggaacatcttcgaccggaatccagaagccggagccatagccatcgtcatagcaagggcattggtcgcagtagtcgccccaggttttctcttctccgccgacagagaatccagtgggcattttgcataacgcttcctcaaccgcttcgatcttgtcggcgtcgctatccatgataacgaagttccacttgccgttatactcgctgcccaggttgattgattcgcgttgaagtttcatagctttagcccctttggctcaattcgtttcgttgaagtcatcatagcaaagccgatcggatggattttaacaaaaaatgctattcctgcgattgctgattattccaccgattcggaatagtggaatagatggtgattgcacctgattccctggtgattagttttgacgaatcatgattgcttttgattgtttcattttgtgcaacgattttgtgagtgtttcaggatttgcaacgaattgcata

SEQ ID NO: 251 - DNA, 49700 bp, synthetic construct
  source 1..49700: mol_type = other DNA
atgtctgaagaacgtagaaaacgcgtaacgaaatcgcactttgcaggcaactttaaagcgctatatgaaaaggagttcggcgtggtgctagggcgcacggcagagatgacgccggaacaattttttgatatcgcaaagcgttacttccagtgggccgaagataacgcaatcaaggctgcggagacggcaacgtttcagggcgacgttaacgagtggggagtgaacaagcctcgaatttttacgctaacagggttaagcctgttttgcggcgtgaaccagtcaacgcttacacgctatcgccacgatcctaactatgctcccgtcatggagttcatcgactccgtgatctatgagcagaaatttcagcttgctgccgtcggcatgattaacgcttctttcgtcggaaaagagatggggatcgataagccaccagtgctgaacatcgacgctatcgccggggataagaacgagatcaccgaagagaggttagagaaggcagtgaccaatattcttgataagctgtaagggtcagatatgaacgaaatgatcatttgggaagacctgtcgccagccgataagctggcaattaaggcgcttagtacgcgcaacttttcgctattcatgaagatctggtttcagatcatccagggagaaaagctgatgtggaactggcatcactcctacttttgccacacggttgatgaaattatcgccgggaagcgcaagagcacgatcgttaacgttgcgccaggctccacaaagacggaggcgttctcaatccacctcgcgccgtatgcgtatcttaaatgccggaaggttcgaaaccttcagatctcgcagggtgacgcgctgtcaaaaggcaactccgatcgcgtgattaagatcttctcatctaacgagtggcaggagctatggccatcaaagttcgggcgcaagcagatcgatgaatttcaggtcatggacgataacgaccgcgtaaggctggaaatggtctcccgttcgtccggcggtcagatcgtcggtaagcgtggcgggtacatgacgccaggtttcagcggccttatcgcgctggatgatatcgacaaaccggatgatatgttctcgaaggtgaagcgtgagaaaaaccacgtactcctgaagaacaccattcgatcccgtcgagcgaagaagaagaaaggagacgaaacgccgatcctttccgtgcagcagcgattgcacgcgcaggattccacctggttcatgatgagcggcggcatggccatcgacttcgatcggattgttatcccggcgatggtaacgcgggaatatggcgaatcactccctgactggttgcgacctgagttcgagcgcgacgtgctttccggcccgtcggtggtaattgacggcgtggaatactggtcattttgggaggaaaacgaatcgatcgagaacctggttgcgctacgcgaagccgatctttatacgttcctttcgcagtatcagcaggaaccgatcgccctgggtggcaacgtgttcaagtcggagtggtggcgctattacggcgattccgacaaggcgcacgagccgcgcccggacaagttcgaatatacgttcatcacggcggacaccgcgcagaaggtcaaggagctaaacgactactctgtaatgtgctattggggcaagtatcgggatcgcgtctacttcattgacggaattcgcggaaaatgggaagcgccagatctccgcgttcaggccgaagcattcatcaagcagtgctggcgtcggaacaaggagtgcggaaaccttcgccggatctacatcgaagacaaggcgagcggtacaggtctaatccaggatttaacgaaggcggtaaacggcatgggcgagatcgtcccggtgcagcgcgataaagataaggtcactcgcgctatggatgcacaaccaatcatcaagggtgggcgtgtcgtgctgccggacaatcacccattcgttgcagagcttgaggcggagatgagcgcgtttacatatgacgattctcatccacacgatgatatttgcgacaacgtgtttgacgccgcaaacctggaaatgaacctgagcgacgatccggtagagcgaatgaaacgccttgcgggattgaaaaagctgggtcgctaatacataatgtgggcctgacggcccacacttaaacaaggttgaaatatgaataacattaagatggacgactataatcaaatctttaatggtggcgctggttatgcgtcaaccctcgcgtctatcgcggcaagatttggaacaatgtcgcaggttgaagagttctatcatgaaaacggcatggcgaagaaaatcgttgacgtgatcccggaagagatggtcgctcccggcttccagctaaacggcatttcagataacaccaagtttcaatctgaatgggacgggttaaatctggagccgcaaatcaccgatgctctttgctgggctaggctgtatggtggctcctacgtcctggcgatggttaacgatggtcgcgcattgacttcggcagcgaagcggggtaagccactcgaatctatcgttgtttacgaccatgattccgtttccgtcgcagaggaggaaaccagtccgcgaagcccacgattcggaaagcctaaaatgtacgaggtgaagccgctaaacggcgggcaaccgttcaaggtgcattatacccgtatgcactacatcgacggcgagcgcgtaaccaacaaggtgcgcaagctaaataatggcgctggtggctcggtgctgaacaagtcgattattgaagcgattcttgattacgactattcggaatatctggcgacgcaactactgaagcgcaagcagcagggcgtttggaaggcgaaaggcctggcgctaatctgcgacgacaaagaaggcgagtacgccgcccggttgcgcatggcgcaggttgatgctaattccggcgtcggaaacacgatcggtattgatgcggacgacgaagagtacaccgttatcaactccgatatttcaggcatcccggaattcctttccgcgaaaatggatcggattgtcgccctgtcaggcattcacgagatcgtgctaaaaaacaaaaacactggtggcgtaagtgcaagccagaacacggcgctacagacgttctacaaactggttgaccgcaagcgcaatgacgattacaagccgctgttagaattcctgttacagttcatcgtaacggaggatgaatacagcgtcgagttcgaaccgttgtcgctgcctaccgatgcggagaaagcggatatcttccagaagaacgccaacgcggctcgcagcctcgttaccgaccaggttattgacgccaacgaagcgcgtgatactctgtcggcgttgattcctgaactgaagctaaaaggcaacgctccgaagcagaaaaaacttccggatcgcgccgctggttcaggcagcacgcaaagcgcagagatcttaaacaacacggaggcggatgatgaaagttaacggcagaatcccaaactggcgttatcctgaagcaagcgagcgggagttatcccgctcaatgcaggacgcggtgacagaactcgtggtagaaatgcgggatcgcttagaccgccttaaatttgacgccacggctgaggaaatcagccaggcggaagacgatatcagcgaatctgccatcgtgttcttttccgccgtaattgcggcgctttcctccattgggttgactatctatagattcaattctaaacagtggcttgcaattgcgatcgcggctggcgggcggaacaacgaatcagttatgcgccttaaagaattcggtgctggtgggtatgaagactggtatcaggaatcgctaaataagtggcaggattacgccgaagcgtcaatcaggaagttagcaagcgatatagttgctgactggacaacgaaagttagaaccgccaacaacattggcaagtctcgcaagcagatcgatgaaatcatcgaaggtcgatacgctatctatggtagttggtcgcgcaaccgggcaagcggaatcatcggaacttttaacagtatgttgatgatgcagcgcctaaaagatgctaaagtatcgcattacttttggttcgggatgatggacgaccgcgagcgcgagagccatatcaagctagaaggtaagcgacgccccgttaatggtgacggaatcttccccggcgaagaatacggttgcaggtgctgggcggttccgtcatttgataatgaggatgattgatggttaactttaatgattactttaatcacgtaggaaaggatctgatatggaagcgagcaacatcaaaccgcgtaaaagttggtgatgttgccgggtggaaagatgagcatgggtatgtatacattagattcatgggcaaactgcgacaagctcaccggatcatttgggaaatgcaccacggcccaataccagaaggaatggaaatcgatcatattaaccatgtaacggacgataacaggatcgagaatttaaggcttgtaaccagaaaggaaaactgtaaaaacgtatcaatgagcgtaacaaataagagtggagttgtaggcgtgagttggtgcaagagaacaggtaaatggtttgcatccataagggttgataaaaaagagcgattcttaggtagatacgaagacaaaaacgaagccatttcagcaagaaaggcggcagaggcaaaatacaatttccataaaaatcacggagataaaaaatgaaaagagttcaaaggttcgacacggtaaagatgaaggccagattcgatgagaacggctttctggttgatactccgatcgtggcgcgtatcggtgcgcagacgtaccagacgccaaccgggcagcgcgtcgagttccgcccgcgttcggaggtgttcgatgctgaatcgctggcttcataccagggcaagccgatcactttgggtcacaagatggtgaacgcgcagaacgcaaaaggccttgtcgttggctcgtgctccggcgctggcaaagaagatgggattggtgttcttgttccggtgatgatttacgacggcgagtcaatcgagcaagccaaaaagcgcgtagctgctgagttatcagtgggctacacttcggtcgatatcgatcgcaaaggttggggtaataacgcaactggcgaatattatttcgatgaagaccttccggaaaacttcgaagagatgaaaaatgattccgtctctgattgggttcgctttgatgcagtgcagacgaagattcgcgtgaaccacgtagcgctcgttttccgtgggcgtgccgggattgcgaaattaaatcttgatagcgaacaagaattcccctatgatgacgactcaaaccacaaaggagctaaaacaatgatcattaaaattgacggcgtagatgttgaagtagcagataacgttggcgcttacattgcaaaactcgacgcgcaagttgcatcggcaaccagtcaggtaacgagcatcaccgcagagcgtgacgcacttcagaccaaagttgatggcattgaagatgaagtcgccgcccgcgttgctaaaatcaaagccgacgaagacgcaaagcagaaagttatcgcggttgtttctgccgctggcgtcaagtgtgacggcctggatgttaaggcaatgaaagttgcttacatcaaagaggttgacggtcgtgatctgtctgataaagaagattcgtacatcgacgcttcttttgactttatcgccaactctgataagatggctggcaatcgctccaaagtcttcggcaaaaaagaagatggcgagcaaaaagacaaaggcggcttaccgaaacttgacggcaccgaaatcatcgatccgcaggcaaaattccgccgctaataatttgcggccttcgggccgctaccagaccaaataaacaggagattcaaaatggcacagattccagcttcttattcccgcaagcgtgatattgccgtagcggggcagatcgctgatacgtcgctttataatatcgacggcacttgcgttgctgaaggcgatatcaaggctggcgtactggtggcttccactggcgtagtttccaatggccataaggtcgttaagccagcgaaagcagcgagcgacgtcattgtaggcatcgcgcagttctcgcaagcctactcgcctgaaggcaagtatgacgatgagagcgcggttaacgttatgactcatggccgcatttgggcgatcgcggacgcaactgttactgaagcagattgcgtgtttgattctttcgccacctttaccgcaaacggcaccgtagcgaagggtgatgccggggttatcaaaactggctacaaacacactggcgaatacaccaagaacgcagatggcaccgttctggtgaaagtgcaggtgcttcagggcgccgttgctccagcggctgcaactggcggcgctggcgtataaaataaggggcttcggccccatttttgcaccagaaaaaaacctttgacggcttaacgattcgtgatattcttcatctcgttaagccaaatacacaaacaggagtttttcagatgactatgaaattagatgcattcgaacagagtgcaattaaggtcgcaatgcagggcatgggcgtcgatgccgcaaaactggatgcttacggtatctggactgttaagcagatgactcaattactgaatcgccagtatgagcaggcatacccgcagaccagcgcacttgagcttttcccggtaactaccgagatctcgccgaccgcccgccgctttgagtggctcgaattcgacggcgtaacctctgcgaaaatcatcgccgattacaccgacgatctgccgaccgttgaagcgatggcaaaagagaagtcagggaaagttttccgcctgggtaacgcgtggtttatttccatcgacgaaattaaaactggtgcagcgctgggttcaagcctgagcgatcgaaaagcaaccctggcccgcgaaggtcatgagacgctcgtaaacgatctggtgttcaaaggctccactcctcacggtatcgtgagcattttcgaccagccgaacattaaccgcatgaccgccagtgctgcatggggcaatgattcagcggcggctgaaaaggcattcgaagatctggaagacctgcttaacatgatcgaagaaaccacgctgggccgccatcacgcgaccaacatcgtgattcctccgtctaagcgtcgtcttctgacgaaaaagatgccggacactagcggcgactcttatctgacttggttcaccaagaaccacccgaacatcaccattacggcgatggcggagttggaagatattgacggcgcaggcaccaaaggcgtgctggcatacgaaaaagacccaatgaacatgagcatcgagatccctgagcggttcaacatgctgccgatgcagccgaaagacctgcatttcaaagttccgtgcacctccaaatgcactggtctcatcgtgtaccgcccgctgactattgcgattctcaccgggatttaatcaaaagcgccttcgggcgcttttttattgcattgcattctgcaatgtgctttaatttgaaacctaaagtaaaccaatggagcattaacaatggccagtaaaaaagaaaccgtagaaaccgtagaaaccgcagaaatcaccagcgaagaacagacgccgcaggttgttcaactgcaaaacgttggtgcatgtgcaattcgctataaaggcacaaattacgtctatgagcaggttttcgaagtgccagaaagcgagatcgaccgattccgccacgaaatcttcaaaggccgcgtcgagttctacgacaatcctaaacgcacgcgcgaatacatcgcagcggtaaaggcgacagcgaaagagatcgtgcagcctaaaagcgcggaataacaaaaaccaacaaagggcgcttcggcgtcctttttcatatcaggagagcaaccatgaattacacaattcaagatgtgatcgataaaatgcgcagccttgcacctccgcttaaagaagttccagatgaactgctgtctgcatgggttgtgcttgccgaagaattcgtttgcaaatcccggttcggagactccatcgttacggcgatcgcgttgatgaccatgcatctaatgtttttggacggcgcaatgaagcaggaaggcgaaagcctggaatcttacacgcagcgagtggcgtcgttcaccctgaccggggagttttcccaaaccttcgatcgcgtgtcggcgtcaagtgataacgaaatgctttctacgccgtggggcaaaatgtactggcgtatgctcaagatgcgcggcggcggcttcggcctgcttaccgccgggaacgtgcgccgctgcggaatggttaggtgatcgctatgaactacaaagcaatccaggcacgcgcaagcgctggcattaaattcttcagcgacgctggcggcgtgttcaacaagtacacgaaaggcgctggcggaggaatcgatccggaaaccggggaagatatcattcctggcgaggtggtgacgacaatcaagggagcgatcagggatgttaatgaccgtgacattaacggcgaaaccatccttgctggcgataagcgcggttttttcactcatgatgtgccaatcatggaaggtgacgaaatcgaagtagacggagagcgctaccgcgtggttaatgcccgcccggtaaaaccaacgggaaccgtcgttgcctaccgtccagttttgcgcagggtggcgacttatggctaattacactatccgcgaattcacaggcgcaattgatgcgtggtgtaaggccgctggtgatgcgctggaggacgttgtaaggtttacgtgtgaagatattcaccgcgaccttgtaatgcgttctccggttgatacagggcgcttccgtggtaactggcaaatcacctttaaccgcgccccgctttacgcgattaacgcatacgaccaaactggcgaaaagacaatccagaacggcaaagccaacattgcactatacgcaaaaggggccgggatcacttcgatctggttcagtaacatgctaatctatgcgaacgcgctggaatacggccattcaaagcaggctcccaatggcgttatgggcgttgttgcgatccggttgggcgtttatgttactgaggcaatcaagcgagcgagggcgaaaaatgcattatgatatggcgttaaaatgcaaggcggcagtggctaaatttgccgccgagaacgggttgagggtcgcgggggataacgttgactttatcccaccgagaggcggggaaacctaccttaaagtctcctacgtcgaggcggattcaagatcggttgacctgtcaaggaaatgccgagtctatctggcgatggttcagattgacgttatctttaagcctggaatcggaaccgatcgagcgaggattatcgcccaacgcgttgcaaaatccttccctgaaggaaagattgttgatcgtgacggtaagttatatgtgagcgagtgggcggaggtacacggcgtgcagaagcacgaaacgggttggttcttcccggttcggttcacagtaagatgcgaccgcacggaggagagcggctatccatccaactagcggaacctcacgtcgcttataatttcttgccagcctggaaatatgtaggcataatggcggtgtaaaactttcattcaaacaggagtattcaacatgcatttaccaaacggtgctaaggtcttctttgagaaggctcgcggtgcgaagattccgtttaccgcaatgaccaacgacgcgaaaaacccaaaaatcacggtggcagatggcaagctgaaggtgaaagatattgtgatcttcaccgattgcacctgggacgacttcgttaacaaggtggctcgcgtaaaagcagtgacagcaggcgtggcaacgctggaagagttcgacacctccgacactaacaagtatcctggcggcgcggctactggtaacgtaagcgtgatcactgattgggtggaattgccttgcattcaggatttaggcaaagatggcaacgaacagcagttctataactatcagtgcttgagcgatgagcgcgaacaatccgaacctacttacaagtcggcagtgacgcttaactacacgtttgcgcacgattacagtaacgcgatctaccctgtgttgcgttcagccgacgccagcaagcaggcgagagcgatgtacatgtatatcccgcgagcttccgaggttcgttactggtctggaattgcatctttcgatgacattccttccacggctgttaacgagatggaaacggtaacgcttaacattgcgcttaaaggtgctcacgtcttccttccggttgccgtgtaattaaatggcggggcttgtgcctcgcctttttttgtgcataatagcgaataacacaaaccaatcaggagttaacaaaatggctaaattcaaaattcaaatcggcggcaatctcccttctttcaagctgcctgtaaccttcacttgccccgacggcaaagaagcaaccatcaccatgacagtaaaacatcgttcaaccgatgagatgaaagacttttatgagagcgaagataaagcgccaaagggtaacgccgagtttatccgcttcatggctgaaggttgggatctggatgacgaattcagcgatgaaaacatttcctggctttgcgctcacttcccggcgttcgtcatggcactgccacaaacttacatggccgcgctggcgggccaccgtgcaaaagtttaaggcgggctgtttatctcacgcttcagcctgagctaaccgatcgccagcttgcggagtacgggttaaggcgatcggattatgaagcagatcttgaaacgatctactttgatgaacagaccgcccaaagctggcagctattccaggccatgcaaacgcagtggcgaatcgggatgaatggcccgacggggcttgactataatacgttgcctatgctgttcgaattgtataaaatcgacaatcgagaagcggcattacttgacttgcaaatccttgagggtgaatacctgaaggagatttacaagaaatccaaataagcgcctactggcgcttttttcatatgggggcgaaacatggctgataaagtagctgggctaacgtttggcgttgacgtgtcgcaggttgataaagcggtacgatcactcgcagaactgaaaaaccaaagccagcaaacgggcgctggcctacagtcacttgctgacgctgaaaggcgggccacggcgcagaccgaggaaatgaaccgcgcattgcagcgccagaagcaagagactgacaaatcaaaaaccagctttagcaggatcgcaagcgccatcgatcccacgatcacaaaaatggccaacttgcgcaaagcgacggaagaacttgataaagcgtgggcgcttgggcttgttcctgacaaggaatttttccgcctgggagccatcattgaatccacaaccaacaatctacggcggcagcaggcggcgctaaccgaagaaggtcgcgcagcaatcgcagaggcggaggcaaagcagaaggcggcaaatgccgggcgtgattttgtcgccagcctgaaacagcaggctgactccatcggaaaaacacgcgccgaactgctggaaatgaaggcggcgcaattgggcgtatcggcagaagcggccccgttcattaacgcgctgaaacagcaagagcaggcgttaaagaaacagcaaaacgctatgggcctggctggcatttctgccgggcaatataaaatggccatgcgccagttaccgatgcagatcacggatattgtaacttcccttgcgtcaggtatgccagtctggctggttgcggtgcagcagggcgggcaaatcaaggacagcttcggaggcttgagcaatacgtttaaggtgttgttgagctacatcaacccgctaacggttggtgctgcgtcgttgggtatcgccctggcggcaatcgctaaagctggttatgactcctggagtgcgcaacgagaactggcgaatgcgctggtgctgactggtggctatgctgcgaccacaaccgggcagatcacagccttaaccgaagagattaacaaaaactcatcggccacgattggcagcattcaggaaatcgcaacatcgctcgccagttctggtaagtacaccatcaaccagattaagcagatcacgaagactacggcggaatggtcggcgcagacgggggagagcgagaagacgatcacagggtattttgatgccatcgtaaaagaccctgttaaggggcttgccgatctcaatgagcgttttaattttctgaaagagggccagctaacctacatcgaatctttgcgtaaaacaaaaggcgagacggcagcagcagatgcggcgacaaaactgtttgctgatactatggataagcgccttaaagatatcgcggacagtgcaacgccactcgaaacgatgtggatggatattaaaaaatgggcggctgactcgtggaagtgggtaggcgatcacacggtaggggcgctaaaccttatcgttgacacggtttccgcaatcatcaacacgatcagaaagctgattgccgacggcgacgccatgatcgcgcagttcatcgttgacgctggccgacagctacagaagatccccggcatgggagactttgggaatgactttctggcgcagcaggagcagttaatcaaggactcgaaagccaaatccgccgagcttgcaaaaaccattgcggaacagcaggcaaggatcgcaaaaggcgagatgggttacattgacgccgcgaaggataaaaccctttccggtgggtacagcagcaaaacgaaggatcgcgtaaatcaggaagaaaaagatatcctgaaaaaccgcaacgccaggaagcagcaggtagacgcgggcgttaaaattgatgagcagtatcaggctgaactgctatcgctacaggcgcagttaaaggttttgcagcagcacaaagggcttgatgacaagatcagccagcagcgcaaagactacttcgagacggttgctaaattccaggttttggaagaggcaagccagaagcgaaaactgacccaaagcgaacagcagatgctggcgaacaaaaagaatatcctgtacatggcggagcaaaaggccatcgtgggagatcagattgttcagcagcagagattgaacgccttgcttgacaagtcgaccaagtatcaaaaccagatggcggagaaaaccaaagcgctacaggataccgccggaatgggtagcaaggagcaggagagataccgggccaatgcgcaaatggcggctgactggaaaaacaacggcggatctttaagtgaccctggatttaaagcgatgcaggccgcaagcgataaattctacgcacagcaagatgcgcaaatgatgaactggaaggccgggttcactcatgcgtgggctgatattggcgacgaagttaatgacgtatacaccaacatcggggatatcactaaaaacacatttaacggcatggcgagcgtgctgactgattttgtaatgactggtaaagccagctttagcgactttgcaaagagcgtgatcactgacattaccaacatgcttatcaagatggcgctgtttaactcgctttctgccgcgtttggtggtggcggcacgttcagcttcgccaacatgttcagcaagggattttctggtggtggctacactggcgacggcgggaagtatgaaccaaaaggcgttgttcacggcggggaattcgtattcacgaaggaggctacgcaaaggttaggcccggaaaacctgtaccgactcatgcgcggctatgcaagtggcggcctggttggtggtaacgcaagttccggatctggaatcaccaacggcggcaacgtcgcagcgtcggcggctatggtgttcactatcggtgacattaacattacgatgggttccggtcaggatagtaaggggatggagcagggcgtaaggcagatcgtgaacgatatgttcaccgaggctttgagccaaaacgggcgcattgcgaagttcgtcaatgagaaaacgagggggtagtagtggattcctttaaatggtgtacacaaattcaaggaggggcggcaaaggtagccgtctccaacaacattcgatcgatcagtttcggaaacggctatatccaaacggcgtcgagcggcattaacaccaagcgccggacggttccgatcgtttatggcggttcagattgggaggaggtttataacttctgtcaggatcacgtaaccaagccgtttgtgtggaaggcacctgatggaagaatgggcgtattcgtcgtaactgccgactccgttaaccttgcgccgcatggtggcggcgtgtttgaggtaactgcggagttcgccgaacgcttcacttcagccggataatcaaaagcgccctttacgggtgcttttttttggcctatgatctggagtcaattagaggagggcttacgatgacagccaacatttcaaaagagtttacgaactgcttacaaaaacttttccccggcgagatcctgacgctgatcgatatcgacgccacaaagttcggcgggcaggtctaccgattccataacgagaacgtcgcctatacaaccgaggagcttttagcggcggtgaacggcgggacgcttcagccaaaaatgatcacgtttcgcggcgagcaatacggcccgcgcccgttcggcctgggcgggatcgcaatgtcgagcgatggcacagtggaaaagccaacgttgacggttagcaatattgatgcgcaggcgagtgctcttattcgcgcctacaacggcctcatgcaagccaaagttacggtatgggttttggtcaatgaattgctgcaaaacgacggcagtgttaaagagggcgattttaggcgatttgtttactacatcgagcgaccaaagcaagtagacccgcaaaaggcaacgttcgaattaacatccgtgtttgatatggacggattgatgatcccggcccgactgacgcaaaccgtttgctattgggcgcagcgcggctggtataaatccggcaagggctgcgactacaacgggcagaacggatacttcgacaagttaggaaacagggttgacgacccgtcgcgggatgtttgcggtggcctggtgtcttcttgcaggcttcgttttggcaatgaaccgttgagtttcggcggttgtgcgacagcaactttgaagagtggtagctaatatgttgactccgaaaattaaaatgcagatcatgcagcacgcgaaggaagtctacccgcacgaatgcgccgggctggtaacgcaaaaatcacgcgtgcaaaaatatcaccgactagacaatgtttctcaagatcctgagaacgaatcaatgccggacgaaacgcagtatgcgatggcgtcaatggagggggagccgatcgccttcgttcattcccatactggcgacggggcgaccacgattccgagtgccacagatttatgcttttgcgatgagtctggattgtcgtgggttatcgtctccatcccggaaggtgatatgcgaatcattgagccgaaacgccgacctctgattggtcgcccctgggctttgggcgcttacgattgctatggcctaatcatggattttcacaagcgccacggcgtcacgctaaaagatcggcgattgccgttcgaatggtggaagccggaatacaaagagaatctttaccaggattactggcaagaggacggattcattgaaaacactggcgagcctgaagttggcgatatgatcatcttccagattcaggcggaaaagtggaatcacgcgggtatttacgttggaaacaataacatccttcatcacgcgtttggcaagctgtctcgccgggatatctattctggatggtacgagcagcacaaggttttaatttgcaggcacaaggagcttaaacatggcatcacatacaaagacgattaaactttctggttcccttgggcgtaggttcggagtattccacaaacttgcggttgattcggttgctgaatgtatccgggcgctgtcttaccaggttgaggggtttaagcctttcatgcagagcaaggttggtttaaatatgcgcttcggcgttgtcgccgacggaaaaccaatcagcgcgaacgaccttgcgacttttgccgtggcgagggagattagaatcatcccgatcccaaaagccagaaagaacggcgggttgttgcaggtcgttatcggagcggcgattatggttgcggccttctttactggcggcggctcgctggcggctatgggcgctttttcgtcggcagcattcatggctggcggatcgatggttttaggtggcgtaatgcagatgatcgcaccgcagatgggcggcaacatgcgggcgagcgaatcgcctgagaataagccatcgtatgcgttcggcgggccgattaataccacggcggccgggtatccaatccagttgccatacggttacagattggctggaggcgcattgttcggttcgggatcttacgcagaagacaacaactaattaagccattcgctttttagcctgggggcgtagcctccgggctttttgtcgtgtacaattgcgatactattaacaggaggctaaacgatgactaatatcaaggcccgcaagggcggttcaagcaagccacgcactcccgtagaaatgccagataacctgatctcaaaagataagatcaagttattgcttgctgtttcggatggcgaggtggttaacgacttcagcctgaagcagttgcattttggaggcgtcccggttcagaacgaggatggaacattcaactatgagggcgtgattgcagagttccgccccggcacgcaaacgcaggactacattcagggcttcagcgaatcaagcgctgaattccaggttgctcgtgaagtcactcacaacacgccttatacgcttaccgtatcgaacaaaaatctttctgccattcgctttcgcctgttatggccgcgcgtgctgactcaaaaagataacggcgatatggtcggatcggttgttgagtacaagatcgagatggcggtagacggcgcaagttatcagacctacctaactggcaaaattgacggaaagaacacgactggcggttacgatcggagcattcgcgttaaccttccgcaaaacttcacgtcgcaggtgcttatccgtgttagccgagtaactccggacgctgacggggtgaaggttgtcgatgcgttccaggttcaatcatacgctgaggtcattgatgcaaaattccgctacccgttaacggccatgctttacgttgagttcgatagcgatctgttccagaaccagatcccaaccatctcactcaaaaagaaatggaaaattattcaggttccgagtaattacgatccgattaatcgcacatactccgggacgtgggacggtgtttttaagtgggcgtggagcaataacccggcatgggtgctttatgacctgatcatgaatcagcgctatggtttagaccagcgcgaacttggcatcccggttgacaagtggtcgctgtatgaggtggcgcaatactgtgatgaacttgttcctgataatcgcggcgggatggaaccgcgctatttgatggatgtaattgttcagtcgcaggttgaggcgttccagttggtaagggatatttgttccgcgttccgtggaatgacgttctacaacggtgaaagcctatcgattatcgtcgataagccgcgcgatccggtgtacctgtttacggctgataacgtcgttgacggcgttttcgttcggacgttcccaagcgaaaagacgatgtacacgtcgtgcaacgtcatgttcgacgacgaagaaaaccagtacgagcaggatgttgaaccagtattcaacccggacgcagccatgcggttcggacacaacccgaccagcattacagcgatcggatgcaccagaaggacggaggcgaaccgccgtgggcgttggattctgcaaacgaacctaagcgccacaaccgtttcgttttctactggtctggaaggtatgattccttcttgcggcgatgtgatttacgttgcagatccgcactggcaatctgcctttaacctggtgctttcagggcgaatcatggaagtatccggtacgcaggtatttttggcgttccgctgcgacgcgaaggctggcgacactctgatcctgaataccgacgacggcaagcctgtgcgccgcacaatcgccagcgtttcggcggacggtaagaccctcacgctaaacgttgggtataactttgacgttgcgccggacagtgtattcctgatcgagagcgatcagcttgcagcggaacagtatgtagtaacccggattgaaaagggtagtgatgacgacgaattcacctttgccatcactgctacgcagtacgatccgaacaagtatgacgcgatcgacaatggggtaattaccgatggccgaccaacttcggttgtcgacccggattcaatgggcgctccgaaagacttaacgattagctcattttctcgcattgttcagggaatgagcgtcgaaacgatggtgatcggctggtctgccgtgcagtatgcaaaactgtacgaggtgcaatggcgcaaggatggcggtaactggaacaacgtcccgcgcaccgcgacaacgcaggttgatattgaaggcatctatgctggcgagtatcaggcccgcgttaggtgcattggcggcgggaatgtagcgtctccgtggtctgctttggctagtgcatcgctgaccgggaaagtcggagcgccaaaaggcccgattaacctttttgcatctgacaacgagatcttcggcattcgcgttaagtgggccatgccagaaggggcggaagacacggcatacattgagctttaccagtcgcaaagcggaaccgatcaggacgcaagcctgcttacactgattccttacccggctgctgaatactggcattcaattttgccagctggctacgtgaacttctataaggctcgaagcgtagacaggatcggcaacgtttcagaatggactgattacgctcgcggtatgtcttcgactgacgttaacgctatcacggatgttatcctggatgagatcctcgacagcgacgcgatgaaagaacttcaggagagtacgcaggatagcgcggcaaaactcaatgactacgcgaacagtatcattcaaaatgcgctggcgaatgatgcggacgttagaataatgaaaaaggagaatggaaagaggaaagctgaaattaaacatgcagaagttctcatcgcaaatgagacggaagccagggtgcagcaggttaaccagatctcggcagaattcaacgaaaacctaaatgctggattaactcaagttaatgaggcactagccaatgaaactgaggctcgcgttacgtcggaagaggcgctttcagcaaggattggagagaactccgcagcgctagatcagaaactagactcatgggctgacgttaatggagttggatccatgtatacaatgaaacttggactaaagtacaacggacaggaatataattccgggatggccatgcagcttacagcaagtggtggaagcgttgtttcgcaagttatgtttattgctgatagatttgctatcatccgaaatgctgagtctggagcgtacacgttgccgtttgttgtgcagaatgaccaggttttcatgaataacgcgcttattcaggacggttcgattaccaacgcgaagatcggtaacgtcattcagtcaaacaactatgtttcaggtagtcgaggatggtcaatagacaaaaacggaacctctgagttaaatgaggtaacagtgagggggacaatttacgctactgacggttggtttaagggtactgtttatgcagagcatattgaaggtgacgtgatgatcgcagagtcaaacacgataccattcaagacatattcagatattgatagcggagattatgaaatactgaaaattcatggagaaaactttgataggagcatcgatacgaacctgattatacaagtgaattctacattcaggaatacttttagagtaattgttcagactccagggaagggggaaatagaattctacagtatagacactggaaatgacggaggtacaagagcatacgcgctacgtggcttcgatttaccagcggctggaagagggcaagagaataggatcatcgttagggtaactcaaagcgggaggggtagcagcataaaaacattcactccatgggttgagagagataatggaaccactggacaagaaccgtctgatggagtcatatataacactggttttatcagagagagggcatacatatcggcatacagaaaaggaaatagaatagtagtctagtgacaaaagcgcccggctgggcgctttcttttaatatgaatcatagatgtaaaaaaggggccgaatggccccttttttcttttgttgtcttgatatgcttgatatgtcatatcgcaacaaagttgatgttgtttttgtaaactcagattgtttctacatgagttagtctttgcagaccgtagatggtgtgaagcgtagcaaatgccatttagtgtatcctcttgtcgcgtctaataatgaatttttagtgattacattactgtaaccagccaatgttattgcctgaacgcccattgatatcgagcagcaggttaggtatgccagcaccttttgcattctctggaatgccaaggttaattgccccacgcctggttgatggtgggcttggaggcaacagcgcatattgcggtttctcccatatgttgccgattagggttgtcagtgcgctcagatcaggggctgtgctccatgcgtcagaccagataatgttatttttgaggataacttgagacgctggcgcaattgttctggttcccgttgacagttgtgcaatgatatctgaacccttcatccacttgcagtagaaaatgcaactctccacagtcagcgacggaacagatgcactctcagtgtcgtacccatttgttgatatcaggcgacgctgcttgacgcttgacgtgtcaataaacacacaattacggacggtattattgaactggttgcggtggtgagatatggaacatgcgtcgtttgtcggattcccaatctgcccctgcagcctctgaattccatcgttgaacgcgaaacagtattccactacgttattaccactcccctgccgacgtgtgtaataaaactcaaagttgctcatcccggcaggtggagctgcctgtagccctgcgttatcagcagagacaaacatcactgtacgggcgcagccagtggagtaaacgtatctgacaacgttatcccaacacataccgtcaatatcaaccgccatgttgtcaggtgccattggataggagccatgcacctccagtttttcaaacataacccgattacaatgccacatccagaaaggtgcgtcatacgccgacactcccccagtagtaaatttatcccaacggtacgaactgtagtagcagtcacgaacgcagctctgccactcgttgtccgtataggcgtcgttcttactggcacaagtgtgaattaatgccccctcctgtacaatatttgtaaacgagcagcgtaaaacctttgctccgtaagtacgggcggcatccccacggttatcagtggtatcagatacccaggtattgccacggatatagacaccggcgttaaccatattaaacatgcagtcttctacagtcattttatgtgcgggattagaaatatctgcaccataaccgacaccaaaaagctgaacgtgcctcccaatcgtgtttttattcggattgcttacagagtatgcattacctgtgaaataacagtttttcacatgaacatcagcaaccccatctgcatcaccagtgcattgcaggttaacactggttgctgctgaggtaaacccgtcatctctgtccataaaatggatgttccgcaccgtaacgcgacgggcattccacgatgctagttgccccgcagaatttgagatggatagccattttggcggcgggccatccccgtatgtgtcaaaaaaactcatttcagacgacgtgttcactaacctggcattaacggcctccttcaacactgtgccgcgcctgattagaattgaaaatgggtagctggtgattgctgcaatagcagcagtaacagttttaaacgctgatggaattggtttattttcatcatcagaagggtctacatataagtattgcatttttagctcctgttaagctggttgaacgtgcagatcgagccaatcgaaaccgttaatgtttgccagtgtcccggcgctcgttctaacttcgatagtgaaggtattcgtgccctgagatacgatgttaactatgtacggaggtgttccgaacgaggttcctgagaaaccaacgggagggcaaaccttccagtggtctccacgtaaattgcatccgctgataacgtactgacctgttgatgggttggtgacagcaattctcgcttcatttcctttattcgccagatgatattcaccacctatcgcaaaaaccccgtctgataatttatcagatagtcggtcagtcacattcccggaaacgcgaactacagttcctggagagtaccgaacatcaccgttattcattttcacgtaaaaacgatctgtcgccattttctctgcgaacgaataaaccagatagtttggagtatctaccgttacattattccgtaagtcattatggtaaaaagtcaccacattgggggcagcaacattaatcggggtgaatgatattttttgcccatacgacggaagtcgcaggaatagtttcgctactgagttattttggtcattaaccaatcctaccgctggcgttaatgcagaatccccccagccagattggccgccatgcagcgcggtaactttcagccattgatagatactgccttggtcaatggacggggcgttattgagggcttgcgggttaaacgtgaccatgtaaacatttggcgtgtagttaacatagttgcctaccgacagaataccagagaccacttttgacccataccccgagtagttaacatcaaacaagcgataaagaactggtgataaattttcaactgtagggcattggtcaatcgttcgttgcaatgatgtgccgatgtcgaaactttttaccagcttgaacatctgcttatcgatagatgagccagtagggtatccaaggtcgttaaactggttggggctaaaaacgaaaatatcgataataccattatcgttagtggtaataagaaaacctgggcttaggtcatcagattcatttccagcagaggggaagcgaacaattttatcttcaaatccattatgaaaatatccagtgccctgcactattggtgttgaaatttgagcagctgataacctcccgtcaacaattgcatatgtctgaatgcgtccgcgctcgtctaagactaaggcagctttattattcggcccgccgaatactattccggcaacgcctgccgggtcgcctggcatctggtgaatttcaaattcaccacgcttaaatatacgctcccatactgacaggttaacatctccaacgctctctggcccttcacctgagaaaaaattaccaattttcatatatccgtcaggctgtgccaaaactacaagcgttgactgttcgccagcatcattgataatttgctgcacttggtctctagcagtctctgctgcaacctctgaagtttttgccttactttcagacgcagccgcagccgcagcgcttgattccgcagcttcggagtctgccttaatttggttggcaagattttgcaacgattcgaaatcgaactccttaaagaactcgactgcatccgcaattaccgtttcctgtgactgataatagcgaagagtttccgcaacatcttgagccaggccgtcaacggttagtgagtcacttaatagtatcgcataatcactagacgctacgacagcgccgtttgtggtaattgctttaatttcagtatcgctgacaaccttgtttactacggccatttgaattggtgacgacaaaaacataattgtcgctccagggcgaatcagcgaaagcgatgattgccactttgtgccagtgccagtaactgttccgtctgcggacatagccgctttgccttctctgtatagtgccatgcatttagtcctctttggttgattgagtaacgcagataatagcatcaatgcacagaaaaaaaaaggagcttttcggctcctttagttgttaaatcagaatgggatatcatcatcgaaatccattcccggattcccccagccgttttgaggtttaggcgcttgctgcggattgggttgttgaggctggccacacccggattgctgattgccgccgccgctttgcgcaggttcgcgctggctgaattcgagttgcggcataatcatttcgttgtggctgtaaattgtgccgttgtgctcgcggttcacgatctgaagcgtccggcaggtgacgctaatcaccttatcaatttgcagtgcttcgtcgtaccacttaatcatgttttctttggcaaagaaaacggcgcggtagttcgtgtaaaccgtttcgtcctggccatcacgattgcggatcttcattcgctccgacaggtctacggcgtacattttccacggcccgttattgttgctgccttccttgacatacggttcctttcggataacacctgttacaacatgcattgtcgttcctatggggcggtttcccgcccggttaaattagttgaaagatgaaatatcttgcgcttctggttcaggttttgattctaccttttccggctcacgtttcgcaacctcttgcggcttaccaggattgaagccgtttgccggggtgactttcagttctgcctggcgtttggtgatatcgtcttccgtcattttccattccgcaggcgttaacgtttgtttcgccagcttatagatctcacgaagcgattcgagatcttcgcacgcgtcaattcgttttttgaagtctttcggcgtcatcttcgtaatttctgcatcatcatccgcctgcttgatgccgagagctgcggccagtgcataacggcgggcgtaagatgttgttgagccgtatgcttgttcgacggttttactgatcggcatattgtactgaaacgccatgaactcaccgctttcatgcaggaacatcgtttcgaggtgcataaccttttcggtgctggtatccatcatggattgaatgaccataattttgtttttctcaagcgccggggaaatcgcgtcgaggatatccccaagatttgcataggtgttccccaggtggttgttcttcccgcttttcttcgcggcaacgaagccagattttgccttgattaatgctgctgcgatggttgtaaatttttcagatgtacgcatgataaagtttccttttcctgattggtaatgcgcactatatcacaagtgcgcaccagtgtttagctatttgtgccgtatacgtccgggaacatatatttcacgaactgcggagtaggcaaaacgacttccgccgcgtttgactcatatgatggccatgaatcatgcttcacgcattccgcatactgatgaatcacgctttgatactgcttgcgaccgatatcgatctgctggctggtcagggtgaacgcaagcggagcaaacggtgattttttctcctgcgttagcagtctgacaactaccgggcgtttttcgttgtaggtcttcacgaacagatcgcgctgcaatgccatcttgagatagtaaccaaggttgaaagcgagccgcccgaaatcgtcaggcttggaagattgcgttgttttgtagtcggtaatcaccacgacctcgaaaacttcatcagggttgaatccccactctttgattagttcgggatcggaaacaacgtcaacatgatctagtcgaaccttaaccttgacgccgaagatctcaccgaagatcgacaattcacgctgtgcggtaggtgattcgatacaggcggcgtgtcgcgggttggccagcatcacgctgcgcatttgaacaaccgcatcgaaatcaacatccctaaccagcttccgcccggagttcatcgcggcgctttcgtcgcatagttcaatcgcccaccaaacatttacgtcaatcccggcgcggtatgccatctccagaagttccgggtaatccttgttggacgtcccaatcaggccacacgctttcagcttcgcagacagtgccgacttcgacgtaatcagatctttaacctcgcccggagaagtcgcccgcaggtactcgccattaaattttgccgtctcaagcatacaggtatgcgaacaggttccgaacgccagcgcggcggtttcctcgcgcaccttgaatttccagtgcgccggggatgttgcgtaaatctcgccgaggcttgagccgctaacgtattccgcgcaccaggaatcaggatcgtgatattgctcgttagtcaattcactgcttgtgtatgccctgaaaattgcttcagccattgatattgctccatttgtggtttcgttgcgttaagtatacgcatgacgattacaggtgcaaggcaaaaagtgctattcgcaattggttaaaaaatgagcgaaatttacgtaagatttagtaagatgcatcttacgtgactttccccatacatttcattgagttaatgcaaatcggtaagatggtaagatccctataggtaaatatccacgaaaaatctggcgcgggatcgcaaagcaaaagacacgtacccggagaaaccttaccaagataaatatagagagatagaacaataataataatattattatttatcatatacttactatctatatatggcggatagttggttaaattttgcgcgaaatttacgcaagattcatcttactaaatcttacctaaagtggttcgaccagttgtaagccactgaatttcaggaataaaaaaaggtaagactgattttgctcaatcttacctaaaatctgatcaatatttaatcagagaagcgacgatgccttgtacaacttacgttcaaatccgagcttaaagttgtcaccgttcggaacgataactttaagatcccgatcgtcagcagccgccagcatatcccgatctccacgacggcaaactacccgcatttctcgcttaccttttccgcccttgcctttatacctgtacgccacgatctcgacgtttgaaggtatgatgcaggcccaaacgtcgcacttgaacgaactagcaatattgaagtgcatcgcctcaatccaggattgagcaaggtaaattggcccgttaccgtcgtcgctctgattggtcactatcaccgatccgaaggtcagatcgccagccaacatcttctcccgaccctcctcatcaatgaacagcatgttgcaatactcatcatctggcccatcctcatgcacgagttgcattggtagcgcgtgaattagctcctgtctgccgttctcgtgagtttttacgccaacctgatatgatttgatatactcattttcaatgccctcatagagcgttacaggcgtgctatcgacggcctccgttctgtttaaaactgccatcactctttcatgatctgccatctttccgtagtcatacccgttatcacgagctacctgcttgtttctcttgaccacgtattcttgcggaaccttgccgagatagcgcccaagaatgttgatgcactcgctatacggctggccgcttaacttcattaaccagccgatccccttatcagcaccgcagcctccacagtatgcgccgccgtctccgcgcgtttctaacttgtcagtccagcggaatcggtctttgcctccgcagttcgggcagtcctggtgcttgccgttgaagtatcgagagtggatgccgcaaatgttctgcaacgcttcgcgccacatgccagccatgtacggcaaaacctctttttcatcgtaaaaatccacgtcgttacctccaaataaaaaaacgcccacacgagaatgataacccggcaggcgtttagtgtttagacaaattgtgctatcggactacgcggagcatttcgcggcggtcgcatcggcgcgtcactggctttccgttgctgtcaaatcttaaatctggtcggcagaatgaggcgcggaatcctttgcaattgttccgtcggtagctcttatgtacgagataagcgccatcggctgagatcatgccgcgcttacgccactgctgaacaacctggatactaacccccaactcttttgccgttccagcgatgccaccgaaggcatcaataaccaactccatccgcgcagtcaacccggcgcgaacctcatccttcagcacgtagtaaccagtcggtcgcttgcgtttcttcttatctttcccgcgcgatgttccgttgttgccgttcaaggttcgcttatcaacctttgccatttgttccataatttaaccctcatagcattttttgttaaacatgataaaatgttccctgtattatacacgcaactatgcgaatgacaaattaggattgcccatgctcacaattgaacaacaaattgaagcctacgcagataagatcacgttaatacaaaagcgattcacggttggcaatatcgttccatacccatatcaggcggtggcgtatattgagacagcaaagcggatcgcaaaatatgaacatccgttttacattaaggcttcggtttccgccgggaaaaccatcatgatcgccatgctcgcagcgcagtgcaaggcaatgaacttacccatgatggttcttgctcgccaggccgagatcgtgaagcaggattcagaggagatcagtaacctcgacgttccgaactccgtttattgtgccgggttgggcacgaaggcggcatacttcccgatcgtcgtcggatctgaagggacggtggttaatggtctgtttaaaatgctgggtgactatacaccttcagttctggctattgacgaatgccaccaggttgactggcaagatttggcggaggcgatcgccaacaatgaatcgttcgagtacatgagcagaccgaaggataagccgtatcgcgtgaacggtgaactggtcgatgccgaccacccatacgacgaaaaattcgactacgtagaattcggcggcggtcgaacacagtacaccatcgtcatttgtgagttaatgcggaggtgccttgagaagacagggcgagaacttcgcatcgttggctatacgggttcggagtttcgcggcgtcattccgattttacaggaagacaagagccagcctggtttttggcgcgagcagatcaccgacattaacacaaactatcttgtcgagttcggatcggtggttccgacaatttttggtgatactgaatccgaagggttagggtatgacctgtcagaattccacggttccagtcaggacggtacgcaggattttagcgcggaagaattgcgcaagatggaaaagaaaatccatgaatccggcgaaatgacgaagctgattatgcaaaaggtcgtggagcgtgcgaaaacccgaaacggagttctgataacttgcgctggacagcggcattgcaaggaggcggcgagctatctaccgccggacgcaacatacgcgatcatcaccgaaaagacgaactcaaagaaacgcggcgaaattttggataaggcgaatcgcggggagattaaatacatcttccaggtgatggccctaaccactggcgttaacgttccgttttgggatttttcggtgatattgcgcaagatcggatcgcttacgttgcttattcagcttttggggcgaggtatgcggcttctaaaggactggcaaaaacagcctccttactcgtgggtgaaagaagatcaccttgtctgggattttgccggaacaatggatgaccttggccagttgtatttcgatccgattttggagcaggcgcaataccaaagacgcaagagcagcaagaacggccccaaaatttgcccggtatgcaagggagaaaatagcgagtacgcccgccgatgcatccacaaagacagcaacggcaatcgttgcgaatatttctggatatcgcagcgctgcgaagaccagaaagacccgcgaacagggaagattaaggtaaaaggttgttacgccgaaaacgatattgttgcccgccagtgcagatgttgtggggtgcagcttaaagatcccaacgacaatctcaccgggaagcattatacgcagaatgactggtatgatgttgtcgggttcgatatcggcttgactcgcaatcagtccgggatcatcttcaattacgtgttactgaaccatgacggcgagcggttcaccgccagggaaaagttcttcccggaatcagagaatcagatttgcggcaagttgtggcggcaaaaggcagtctcccagcacgttgacgacgcggtaatgcgtggcaagttgggcggtatgaaaaacgcccgcaagatcctggagtatgcggaatacttccgcgcaccgaagcgcgtaacgcatcgcatcaacggcaagaaggaagatattatttcacgcaaagattttggagacgcagaatgatcgcagataaaggtgattatctcgaatactacggcgggcctgtgaaggcttgtccgcttgagaaaatcgatcagatgaatagcgtttcgtggctgcggcacgaataccctgattatctgttctggcacacagtcaatgaaggcagcaagcacaaggcgagcgcggttatcgatcatcaaatgggattgcttaaaggcgttagcgacttcgttatcctgattggtttcggtggcaaatacccgttcgcagccattgagctaaagcgccagggtaaggcgcaggcgtcgccagtgagcaaggagcaaagggaattccttgctgccgcccggcgtcgcggcggattcgccgccgtggcctatggcttcgagcaattcaagattgctttctgcgatgccataaaatagcactttttgttaaaaccgcccggcgaaagccgggtatcatttccacatcgaaacgaagaatggagtgttgaaaatgaaaaagatgctggctttagttgttctgtctcttggtcttattggttgcagcgaaaaaccgaaaacatatgattgcggtggtgaagcgtttgaggtaactagcaactatatgaaagttgtcaagggtgaaaactctggcgttataattgatggcgctggcgaaaatcaatataaactgcttactccttttgggtacgctcattatgcagtcaacaaaaacactattgatgttagcgtgggcgcttttcacaataccttaacctgcgaggttaaataataatggcaaaagatatcgcagacaaagacactcatgacgcattcatcacgtttgagcaattggagcgcgaaacgtttattggcaacgcccttgccactggcggacactatcaagccgtcaggccagataagttctatcaggtaactggcaaccgatacgcaggtagtaaaacgccggatattgtgcgcgacaagtgggcgacagatcgaagtctgatcgcatacatggaagagcgttacggcaattacgatcttgatgtcgccgcagaccgaagcaacgcagtttgcccgaagttctacgacgaaaaaacggattgccttaaacgctggtgggggaaaaacaagcacatttggctgaatcctccttactcgtttccagatccgtttattctcaaggccattgagcaaatggagcacgacaaccagatcgacattctgctacccggcgacaattctactgcctggttccgtgacgcgcagaagatggccgccgaaattatctggattgttgccgatgttgaagaggatgattacgggaacaagttaagtcgatccggtcgcctcgccttcatcaatggattaagcgggaatccagtcgacaacaacaataagggaagtgttattttcatcatgcgcaagctcaagccgggagaggagcaaaagacactttacattccggtaagcgagatttgcccgtcattagctaaaaagcgtatgcgcaaacgtgggatctgaaaaatggaacagacagagtctttcgccgagtatcttcggatcgttgttgaacttctggacaagcacggcttcattgggacggatgaggaaaagttagcctttgctgacaccatcgacggaacctacatggagttcatggacaacggaaccccggtcgctgactggccagaaattcttgaacgagaattgattgagtttaaatcacatgaaggcgcggagtatttcgcaaaacagcactaattgctaaacaatacccgccgcgtgcgggtattattactccaccaaccaatcaggagcaaacgccatgaaaaccaaaaccattgcagacaccatcaagatcgtaccagtaaaagcgcaagtggtatcgcgtcaactggttaacctgtctcgcctgtgcatggccgactacatggcgaacccttcagataattgccttgatggtgtagtcggtgagatttattttcgcgctggttatggactggaaagcgtggccatgtatgagcaaatggccgaaggtttttgcatttacggtgacgaatgatgattgtcgagactggtcgcgctgccgtatggcagcacgcaaaagaagcgggaataagtgatgatatcgtgaagatctcaaagtatttcgatatcaaagatatatcaattatctttggtgggaagctcacctatctaaacgagcgcccggtgaagcgcacgcgaatagcagtggcaacgcgtgcggaggccgacgcgctgaagatgttcatacatgagtcgaaacagcagaaaaaatattacaagtagcgggggcgtgaagaatgcgatatattgcgatcctatttacggcgatcctgttcacgatcgcaatcatgaactgcgcaattcaattaggataaattatgttaccgaaaatcacagacgaagaattcttagccgcccgcgaggaaggtaagacctaccgcgagatcgcggaagagttcggcatgaacattcgaagcgttgaacgtcgtggcgttcgcctggcacgacaaggacacctacacggaaacgcccacgtttcgaagcatatcccggacggcttcggcgtcaaaggcacgtcgacgatgattcgcgcggacggctccgaggtcgttcggtgggtcaagtcggaagtagacagagatcgcatggtcgcgcttatggaggcggcgcaggcggctttctgcgaagaccttccgcgagctgaaccgcaaccgctggatgagtcgaagttctacattgaagatcagcttgccctgtacccaatcttcgacctgcatattggggctatggcgcataagcatgaatgcggcgagaactatgataccagcacggcagagaaggttctaaaccgcttctttgattattccgtgtcggtggctccgcaatccaaaaaggctgttttgctggttggcggtgacttccttcacagcgacggcctggacgcagtaaccccggcaagtggtcacgttctcgatcaggacagccgatacgcaaaacttgtttatgttgccatccgctcgctgcgtcgcgccgtgtcgctactgcttaacaatcatgccgaagttgaagtgcaggtaatcgaaggcaaccacgaccaggccgggatgatttggctacgcgcagcgctggcggcgttctatgagaatgaaccgcgcgtttttgttgatgttagccctgcgatcctgcatcgcaccttgtggggcaaaaccatgctgggctacacgcatggccacacgatgaagaagcctgaaacgcgccttgctgcgatggctaccgacttccgcaaggagttcggccagtgcgactacatttacacgcattccggccactggcatcaccagactgtaacggaacactcgttaggtattgacgaggtgcatggccagttaggggccaaagacgcttacgccgctcgcggtggttggcgctcctatcgccaggcggcggttattctgtacagcaaagaatatggcgaagtaggccgctttatctaccgcccgaacatgtaaccacaacggccccgcgaggggccaacaaggaaaaccgatgaatagaaatatctgcattttcgatctcgatggcacgttgtccaatggcaaccaccgcttgcacctgctgccgaaaaaggatctccaccttacagaaagttggagtgaatttaatggtgcatcaattggcgacagcccaatccaaagcacaattgatgtagcgaatgcgcttcatcgctccgggatgattgtcgttatcctgaccgggcgatccgatgaggtgaagaccgaaacaatgatttggcttgaccgttacggggtgaaatatgacaggctcatcatgcgtcgcgccagcgacaaccgtaaagacacggtaatcaaggaggaggagttacgcaaaatcggaattgatcgcattgttgcggcatgggatgattcacccaatgttattgcgcacttgcgcggcctgggtattacgacttaccaggtctgcgactacggagacaatcttcaagatcatttaaaatcgcacggagtagacaaatgaaaaatgtaattattctcaacggagcacccggaatcggaaaagataccatcgcggaaattatctcgcggaagtgggaatacaagaaccttagcttcaaacagcctatgtttgccatcgcgcgtgctgtgcttggatctactgattttgcacgctttaccgccagataccacgaccgcaagcacaaagaagtgaaatgcgattttttgggcgaccgttctccgcgtgaattcatgattcacattagcgaaaacttcgtcaagccgaccctgggcaaaaatcagttcggcaagttgctttgcgattcagcgctaacttcgccgtttaactgcatcgtcagcgacggcggttttgatgaggaggtcgagcacgtcgcagcgcatgaggcgcttaacgtatttgtcgtccgccttcatcgtgacggcatgacctttgagggtgatagccgcaaacacattcgacgacccgatctgatttgtgacacgtatcacgaacttgattttgatatgaccactggcgagcctgaagacgacgcgcaaaaaatccttgatatggtttcagatgttgcattaaaattataaagttaatgcctttattatcaccaccttaacgattgggaaccttgacgggttcccttttttttgttcttaattttgccaaatgaatatatcatcaccttaccatttaactaacagaggttgcatatcatgcgggaattcatcaacgcggcaaccaatagcagcggcggtgttgcccttgcgggatctgcatccgggcaattaatcattgctgccattggtttatttttcatgatcttatttggctcaatcggcacgtggctgaagtggaaagactcaaaagccatccgggaggcgattgattctggcgacattaaagaggcattgaggatcaggagcaaataaaatgggaatgaaaacgcggcttactttcgcggcggcggtggcgatcgcggtcgcgttcctccccgaagtggaggacactaaatacacggtttatacggatatcgctggcgtaccaactgtatgcgaaggaatcacaggcccggacgttatcaaggggaaaacctatacccggtcagagtgcgacgcgcttttaaccaagcatatccaggtagcaaagcgaaccgttgacagcaaaatcaaagtagatgttcctgacaccttcagggcgtcgatgtacagcttcacgttcaacgctggcggcggcgcatattctggcagcaccatgctgaaattaacgaaccagggccgattgcgcgaggcgtgcgagcagctatatcgctggacgtactaccgcaacccgaaaacgggtaagatggagaagtcaaaaggcttgcataatcgccgggttcaggaatatcaactatgcattaaggatctaaaatgattaaggtaattggtgtggctcttacggttgttcttctgtctggttgcgcttccagtgtcccgatcctttccgatctggtgggcagcaagccggatatgacggcgcaagtaggcgcggagaacgttaaacaggcggttggcgtgacgaacaaaacggacacgtcaagcaagcaggagactacgttcaaagagtcggcggtaggaaaggttgacacgtcgaacaaaaaatccgtaacgacctccagcattcacgccaaccagatcacggcggacaagatcgagatccgaaacgatgaaagcggaagcctgactccgtggctgattggtggtgttggggttgtaatgctggcgataggtgcgttcggtctttggcgggaacgaaaaaacaaaggggcgtaatgcccctttttctatatgtaccgcttgacgtgcaatagcgctactccgtcttcatcgttaagaccatgttcaaccgtgttggttgcagccattccttgatagagcaagatgagcgcggcacgcaagtaattttctggtgtgatctgtttcacacaaacaagcctgtgaacttccgttatcagatcttccacctggtttcccgaaaagctgttcatcactgagttggtcaaggtgcatcatctcccatatgtatcggttatccatcccttcgaacgaccggaaatcaaaacctatttccctgttatccggccccgtacaccacacagagccgttttttccgtcaaggtatccattcgtatagcttcgcgctaaaaactccttagagaccattgaggcgaacatacgttgcgatacgttggcggcttttgccagtcgaggcgcttcgcggtgcgtatagacgaacttcgcaaaatcctgccgggtgaactcccggcgagattcgcagaacttgtaaatgtcaagaataaacatcaattacctcatgaacgacgggttgataaagacttcggaatccatcacgcagataaagcctaattcctccatcttcggcaataagcgttccttaatctttttgctcaccccggcctggcctttgaagatcttcaggttgcggcaggcgttataaatgccctggacggtcataacaccttttgcctgtttgcagcgactggcgataacgtcatacatcgctttaatttccgctccctcaccagcaaagccggaagagtcagccgacgacaaatacgttttgctcaattcatggaacataatgatcgcttcgtcaatggtcgccgtgtcgatcttcttcgagcgcttcccgccgggttgccagttccggatcgtgtgaatcacggacgccagacgcataacctgcttatcaaacttacccatcgcgccgcgaagcattgtatgcgaatacttgccgccgtcgcctaactccggttctaactcctggcgggccttgttcagcctacgcattgccgcgtcagtaacctgcaacttaatgttcgactcgctcataatgtcatgaatcagccggaagtaatccgccttcagtgactggtcgatcggctcataggtcgaattcccgttttcgtcgatgaacacgcgttcacccaaacgggtttgctcacgaaccaaaaggaagcgttcagataccccgatcccgcgagagccggcctgcataatggcgtcgatggtttcatcctgggcaattacgcaaatgcagcccaaagcctcgaatgacatattgttgctaacgtcggcacgagcgatcgatacgtggcctttatcccatgctttgagcaccagttcgctgttcgtcttcttaccgccatcgtttccatacgtgatccctaaaaggctgttaaccgccgtcgcctcatcggaaataacggcaaagtttccctgtcggttgttaatcttcgccagaccttccggggtggtatcagataccgggaaagttaggtcacacaatttttctaacttctcctcaagttcgtcacggtcttcaaaaagtttcaccatatcagattgcgataactccccttttagcgcctgcttgttggcggacagcttcgccatgattttcttacgctctttctttcgagactcgttaatgcgttcgacttcggcgacaataggatcgatggcaagcgagttaatggcagacttaccagcggaaggcggctgcgacgtgataacgtaaagcgttgtcggttgctcgctgccgtggtactcgacccaaaagcggcccatcatcgcggcggatacggttccgagaaagtgcatgtaagcggatgattccgggaactgaacagaacgcgctgcatttagcgccagcttgccgacaacatcataatcattggcgatcgagattgttggatacttatccgcgtttacgtcgatatctttgggctttggccagaatgaaacggagtcacgatacccgttcgcacgaatcgcaacgcgcaggggactgatcccctccctttctgcgatggcgataatatcttgcggtgatacgcggtcatttaaaaacatgcccttgctcctgattggttaatcgttcggctaatcatatgccgtattaaatccgagatccagtgataatctaaacacgcttgaaaaacgcgcttggattatcggggcgcatggccccgaacccgtcacaggtatttagcttcgaaagtcgttccgtccgatacactgaagccaacttcctcgcggtacagcgtccagcggcatccatcacgatcgaagatgtatccggcaaccgcgccgagcgcacgaccgctttctacctggtagcgcttgccgacgctgaaggattttttcatcgggttgctatggtcaaggccgacgcattttagcgttttggtttttagttcgatgaacgtcgcaatcacctggccaccagcgccagcaataaacaactcgccgctaacgcctaccgacaaaataacgcgcttcttcttcagttcgacgctgtcatataccatcattgacacattgccttcatcgtcgacgcgggcgggataaaggttattttcgtgtatattaatagcgcggcttgacgtgcatttaatcttgattgacttcgccatttattttctttctccgatctcgatgtacaggtttaccaaatccagaaagtcagccttgcttttgcaacccaacttaaagccaacgtgcgactcaattttattttgcatcgcagccagtgttgcgccgccattattcatcctgagaacttcgcggcatacttcggcgagcttttgagatatcatttcttcaccacctttatttccatgccttcgcaagcgctcttgatatcattaatcagacgattaagccttaaatcagtcattacatggtgatgacgtatatcaataattccagcaacgactaacagcatgacggcaaagataaaaccaccaggcccggacatacacaaaacagttaacatcatcaagataataaatttcatttccgttttactccgttgcgtttcgatggggtgattctacccgactttcgccgggtagttttagaaattcgtgctattctcgataattcgcctggaacacggcgcgggcaaaacctcgcggagtaatggaacgcagcattttagtcctttctgaccttccacccaaaaacttccaggcccaaaagaaattcacgccttctactccatccggcggcgtgagccgtttcggttcgacaaaaccgtttccgtgccatatgcacgttttcttcgtgtaattgtcacagtggggcattttgggatgccacacaggctcgttcggagaaacatagccaccgaagtcgcgcggatggaaataaaaatccggctttcgccatagtgacgataatttcccgaccgggttttcgaccatccaggggcaaccatacttattgcctaattgctcgaccatcttcgcatcccctgctgcggataatacgtcattatcttcccttacgtgcttgattccgctatgcgctaacagcgtgcatggcgggaaagcgaaaatgaagtcaggatctggaatgccgagaatcgatcgcttaacgtcaaaatccttgtcaatccaaatgttaacatactggatatttgggtgaaccattcgaatgctatattctccgtggtcgccggagtcggcgttgaaacagtacaccttgcatcccttgatggcccacggcaggcccatgatgccggagccgtcgaacatgcagtaaataaccttttctttcatgctttccacgcctcaatgaacattctgttcgattccagcgtcagcgtgacgccagccagggaggactgaatgagacgaccgcccggaaccgtcccgatgatgtagcggcctttcgacttcgtgatcgtgatctgagtgaagccggaggcgcggttcatgcggagaacgacgcggccatgagcgttcaggacggcgagaatggaatcagtcttcggatggttcattgtgtagctccttcgtttgttggtatggggacagtatgccactatcccgctgtgttgttttagcaaaacgtgctattccggaacgcaggtcgcgtaatcctggctgatgtagatcgtgcgctgaacgcgaggttcgagatcaccgagttcctggatggtaacatcgttgcttcctacccggcacggaaccgatccgaaaataaactcgccagtctgcttgtcgttgatttgccatacattaccgccttcctttttgacaaccaggaaaggcgcactgtctgcactgaactcttccgggccacgaccgtagtaatgcgtgatcgcagctttggccgcagcgctgaaggcatcggtaacgtcattggtcgccttgtctcggatggccttgatacgttcttcaggcgatccgatgatgtaggaaaagctgttcgaaatggtaactgttcgcattatattttaacctcgttttggtggatgaagtcggcgacgtaatggcattcgatcgggttctcgatacccgccagcacctcgcaagacccgttattcagtagctggcaatgctggcactccgcaccgccaacactggcaatgacaatggcgatcccgttgcatgaaccgccgaacattcgatgagggaagtggtaagcatcgcaggtgcaaaccacctccccggcccgccgtttcctcatacctggcccttctcgatgcagaaaacccaatcacgagcgtcaaccgcaaagcgtgcaacgccgtcgagcaccacgaagacagtaaacccgttgacgccgcgacccttctcgatatcggtcacggtgcggaacagatcgcttgcgccatattgaattttatccccgacgactacatccgcaaatgctttcatggttaatctcctgactggtttcgatgggttaactataccaggcctcgcggcccggcgtttagcaattcgtgcttatttcactgctttcttcgctgccttgtacgcctctttgaaagccggaacatcttcgaccggaatccagaagccggagccatagccatcgtcatagcaagggcattggtcgcagtagtcgccccaggttttctcttctccgccgacagagaatccagtgggcattttgcataacgcttcctcaaccgcttcgatcttgtcggcgtcgctatccatgataacgaagttccacttgccgttatactcgctgcccaggttgattgattcgcgttgaagtttcatagctttagcccctttggctcaattcgtttcgttgaagtcatcatagcaaagccgatcggatggattttaacaaaaaatgctattcctgcgattgctgattattccaccgattcggaatagtggaatagatggtgattgcacctgattccctggtgattagttttgacgaatcatgattgcttttgattgtttcattttgtgcaacgattttgtgagtgtttcaggatttgcaacgaattgcataaatgtatgcaccatgcacgcaatttgccgatcgaagccagcaaaagcgccaggtgtttttcgccaacatttacgtcgtgtggaaatgtgggggaggaataatcttacctaaaaattgcgcaaaaagtgaccaacataagcctataatagatatataagtatatgataaataataatattattattattactctttatctatatatatgtttggtaagatttcttcggggaggttatggattcctcttgcgcaagccatagtttttagatgttccgccgcgaaaaaatgtatatagggatatataggggatgacagcaaatcttaccaaacacgcttaaacccttttacggcaaggcttgcgggtggtaagatgacattcccacacaagcaaaaacgacgtaaatgttggagaaaaacacatgcaatataaaggctatgagttcgaagaagtcgacgtgtccgagtggatgcagtacgacgcagataagcaggcagcttaccatgaatggctgcaatccatcacgtttggcggctcaccaggggtagacgatcggccagttgctgaaaagtcacccgccgcattcactggtaatcgttcgtccgagatccggcgcatgttcctggatggcgggcgacgtatccagatgacggcggaggagttcgcggataagttcggcgttcatccggtcgacaaccatttccgcaggccgttgctgaaactcctggagccgggagaagtgttgcgggtgagcctgggggcggggttgatctccgtctttaccgagttcgacgcaatgactggctcaaacatggaggctgaggcatacaggcggcagggcgctatctccgagagggaaaggattaagggtttagtggccgctcttgctgtagactttgccggacatgccctggccgggatttacaaggcgaacttgttcgcggctatcgatcttggattgaccgccagcgatatcagccaggaagcggccaccacgcaatagcactttttgttaaaacccggtcagagcgatcgggtattgtctttccatcgacaacgaaccgaggaaaacgaaatggtcactcttatcacatgggaacacgaaaacagcgagccagtggtgcgcgaattcgagaccgtagcggcatgttacaacctggcggcaaatggtggcttttacaaggcgcagatcgttaacgagttcggggttgttgattatgaattttaaggcgagcgacgtaaaacctggcgtggtctacggatcgcgcctcaataaccgcctttggcggtgggacggcgaaactatgtggactaaaggcgagggcgatgttatctggcatgaatgcggctggccataccccaccatgagccgcctcgatatcgcttattatctttcggttggcgatatgcacgagatggaagatagcactttttgctaaaacactgctgtcgagatccggtattatttattcatcgacaacaaagaggagatgaaaatgagcaagaagaatccatattcaaccagcaactaccataacgaacacgtcatgcgctggcactggcagaaactcaaagaacgccaccttgcacgccatggcaaataatcacaatagcgccgcttcggtggcgctgtatcccaaccataaaaacggcttacaccaggaggattggccatgccacgattttcagcaacaacaaaacttcgcaccttcgccgggatgccgatcccatactcatcaaccaaagccgtccagggcagcgagcacggcgtatacttccactggtgcggcaagtggcgcttcaccgtcattcgcggcttttacgtgacctgcgaccacgtggatattaccgactattccggcggaaaccaggttcatgagttcaataggcacgaatagcactttttgctaaaactcgatcggggcaatgcgttattattaccccatcgaaacagaggagcaaaaaacatgattggcaaccacaacaacgaactgaacgcagcagcccaccgtcgcgccgtcgagcagaacttcaacgcgcttaaagtagcctgcgatgagatgaaagcaatgcttgaactgccgtcatgggatccccaactcgaagactattacgacggcctccgcgtcaagcgtgacgatatcatcaaccgcctgcgcctggctggaatgtttctgtaaggagaacgcaatgattcacgaaattaagtctggaaaacaagtagtggccaccatcacgcagcgccacgttgtagcatttcagtttaacatccccggcaccaacgatatgcagtctcttgacgtgccagtttgggctaacacgatcgccattgatgccgacggctcgatttgggcctacgagtcgaccgccgaggatgtttgcatcccggactactcgcgcaaagcctgggtggattgtgggccttccgaaaacaagatgcggtcagtaggggagatggatcgcttccatgattgggcagaatcgaagattgaccttcgcggcctgaaatagcacgcattgctaaacgcccggtcaagggatcgggcataatcatcacgaagtctattaacaaaccgattatgcaaggagacagaagaatgcaacaatttgaatctcgcggcaagacatacaacctgccggacactgctacccatgccgcccctggtgcgtgcggcggcctgtattttaaggatggcgatagttggtttttcatgggggatgtggttgggggtgtaccgacgaagacaggcagcttactcgtgggcttctacgatcacgacttggtggagttgaagccaaagcgcgtaccgttcgctttctggaaaaaaatcaaaggggcgatctttaaatgaatcaattcgaattcctggcgcgtgcgcaccgtgcgcttgcaatgtacgccttcagcaagaacatgaagattatcagtgttgaggttgagttcaacaatatcagcatttccggctacgttggcgactcataccacgtgacgaaattcagcttcccatcgctggcttgcctggagcgtgaggcattcggtttctgaatagcactttttgctaaatgcccggtcagcagatcgggcataatggccacacaccaaacaacggagattcaccatgattcgcactaccagaccactacccaataacctttacgccacgattggggttcgcgcggtgagacttattcacatcaacgaagttggcaacgtggctattttgtggtttaagcgccactcaagcggtgttggcctgagcattcaaagattcgggcgctttaacggcaactcccaaacccattctcattgggttgatggctcatactgctggacgcacgttaagcacgtcgagaacttcgacgccaaatcactgagcgacgacgacgcctggaagatggtaacagacctcttcggttatgatgcctgcatggaggtagttggatgatacgtttatcagacttcgatcgccactgcttaaccgggcaatttggcgaaaagccagtaatgtgcaagatctcgaagtaaaaggcgaccccgtcgagcaggtcaatacgcttaaaggcctggcaatgcgcaaccgactttacatccatgtgcgcggcagactgttcgcacagcaggttcatttttcgcatgggacgtggttctacactggcggggacggggttggcccatcgcagaaaagggttatgctgcgcgagataatcgaacacggttacgtttggactaacgggatctactaatggaaacggtaaaagtaatttgcacgcacgctggctattcgccgctatccacctatttcacgcctggccgcgagtatgacgccatgttcggccccggccttgatgaagtgtggattttgcaggacgaccagaacaccacggaagacgaagaattttggccagcctgccgcatgccggacgaaaagatcgccatgtacgccaataggccatacgaaaacaacgttttgtttgaggtgaaagtatgaaagtaagcaaaaagaaactcgcgctgtattgggccttcttcctggctggccttgccctgcataacagcgtgggctggcagacgatcggaatgctgtgcatgattattggtgtatgccgactgtctgagattaacgggttccgccgtggatatcgggcagcattcagcggcgaaaaagaatagcactttttgttaaaactgccgtaacgtcatttgataaagtggcgttactgaagtgaaacaatccaatcaggagcaacgcaatgaacgataatttaatcgcactgctggaagaactgaattcctacggctgtgcatacatcgagctttctagcgaacacgttatcgaagtcattattgacgatgacgcagggttcaccaagttaagggtggctaccggggccgaagaggaattcgaagactgcggcatccgtgaagtaaccaaccttctcgaagttcaccaggtgaaggagatccgctaatgaaaaccgtcaaactaatggttgtcaatgcggcccgcgaacgtgaacgccaccttatcggctgcgtattcgatgccgtcgaggtaaaagactcaaaaggagactttcacgtaatacagggcggataccttaacgaatttatcgtcaatccgctggatactgacgaagatttgaccatccgtgttggtagcgagccggaaaacgcgcttttccacctgcgtaaagtatcgaaggcatcgcagcgcaagttgctggttcgcgcactgaagcgcatagcgaagcagcgcggctacaccgatgcatacatccgcaagttcggcacgttcgctggagtaggtgattgggcgcggtcatgggccgacttttatttcaacaaatccggcgaattttgttcagcgcatacggactggctgcatggcacggaacacgatccagttaacggccacgagtggtacgaattcattgaggcggaattagacgccctttgatagcacgaattgctaaaacgaacgtccggggatggtgcatactatccccacactaacgaacaaaggaaattacccatgaacaaaccaaaaatcatcctgatcccgtccgtcgattccgtggttaatacttatgctaaattcaccaaaggcaagcgctataccgcaaccgcatttaccaaatgttccggcgaaatgctgtacaaggtcagcgatgactacgggcgcgagtatcacgtaaacccaagatcttcgcactatcttggtggccatcgcttcgatattgagtacccgatcgaagattgcagtaagcgcgactcgttcacctacgatgacagccgttctatcgccattcgcgctgcaaccatcggggacgggtttattagccgggcctgcatcgttgatctgatcccgtccgataatcacgccaaagacgacgccgacacgctgttaaatgccgtcgttcgcgccggaatcggcttggagttaagtgatgcgtcgtgcgaatcattcatgcgtgaaccgttctcacgaatcgcggagcttgaaaagcaagttgcgttcctgactggtgaacttcaggccgcaaacagcaagatcgagaatgttcgcaaaatcatgcgtagcaagcctggccatgacattgaagattacgcgcgggttttgcgcatgatggccgacgcattcgccaaactttagcagtagcacgaattgctaaaacagatcaggggtaagctggtatagttaccccatcgaaacgaaacggagttacagcaatgaaaatcaaaatcaccaaaatcaacactcttaacggcgacggctcaattaccctggaagaatgcggcctcaaaatcggcgaagttcttgaggtcgacggccacttcaacgacggctcatactgtgtgatcgctccgcgcaatagcgagtttatccaggctggtgacaatatcagcgtaagcgcagacgaatgcgaggttgtggaagaatgagcaacaaatttgggtactgacttacaccattggaaccaacgaggggcgcaaatcgcgccgcctcatctgcgacaccaaagagcgggcgattaggcagcaaaccgttcttggtggcgaacttgtcgagtatctccgcaagcctgaagcgttcaaggtgaactggccggaaggcatggatatcaacggcgctttagcgagcctgcgtgaattgcagaacaacccgaagacgtggagcgactttcaatgcctgcgggcggagccggaagtgaaggccgaccagttcaccaatgttcggtcgcagcacgcggagtggtcggatcgccagttcggcgacgttgggccagtcgggccgctcaaacacctggcgaaagaggcgatcgaggccgccgaagcgccggatgacattagcgagttcgctgatatcctcatgctggtatgggacgcaacgcgccgcgccggattcagcgatgagcagttggctgaagcggtggcggaaaagctggaacggaacaagcgccgggcgtggggcgaggtcaaagatggcgagccttgccaccacgtaaaaaattaacgaaatcgaatgccgtttaaagcgcctgtaagccattctggctggcgcaaatttaaggagtacgattgtatgcctgaatactcgaaagtcgaagatatgccgattggtgcaacaattactggtatccgcatgagcgagtcggacgacgccatcaagccgctggcgttcccggttacgcaggtggagacggacagcagaaaagggttcatcttcatctacaaaaatttcaatagtccgctgcgggttgaagtattcatcgctcgcggaacctgggtagaatgggagaaggccaaatgttcggactgaatgaagcgcagtacaacgccgtaaagcgcatagcaaagcagatggccgcagaaacaaaagacgccatcaagaaggacaagaagacctacgatcaggtcgccgcgaagatgatcgataaacattgggcgcaaatcaacacgctggttactcgcggccagtttatatggatagctggctacctggaaggccgattcggtcgaagggatggcgagtatgaataaaaaacagccaaacgattcagtgacctattgacgcaatcgcgctgatcgggtaacgtgaaccatgtagacacaagaggcggtaaacatccgcaagcctggccccggttaggggcgtttacataggagttatgatgcaatataaaatcatgctcacagcaagaaaaatgggtggcttttgcaaatcctgcattcaagagttcagcatgactattgaggcgaacgacaccgccgacgcggtagagaaagcaaaaaagcaatccggcgtaaatctggatacgcataaaatcaacatcaactacataagggaaatcagatgatgctaactgtgattattgctcttttaatgctttttataggttatcacgtcggagcggctcaccttgtagagcgactttcaaagcgggtacatgaaggcacctttgctgccatgatgtacaataagaaaacggcacgttgggaaaaaattggcgatccggatggtatcgcaaaacgaattgctttttcgccgcttccgtatgttgactgtgagctatttgtgaaactacagaagacgctgaatcggcgaaacaaactgatatgacaaaagaacccgcttcggcgggtttttttatgcccgcgatctgatatactcgcaaatcaacacagaaggaggattacaa

SEQ ID NO: 252 - DNA, 49701 bp, synthetic construct
  source 1..49701: mol_type = other DNA
tgtatgcaccatgcacgcaatttgccgatcgaagccagcaaaagcgccaggtgtttttcgccaacatttacgtcgtgtggaaatgtgggggaggaataatcttacctaaaaattgcgcaaaaagtgaccaacataagcctataatagatatataagtatatgataaataataatattattattattactctttatctatatatatgtttggtaagatttcttcggggaggttatggattcctcttgcgcaagccatagtttttagatgttccgccgcgaaaaaatgtatatagggatatataggggatgacagcaaatcttaccaaacacgcttaaacccttttacggcaaggcttgcgggtggtaagatgacattcccacacaagcaaaaacgacgtaaatgttggagaaaaacacatgcaatataaaggctatgagttcgaagaagtcgacgtgtccgagtggatgcagtacgacgcagataagcaggcagcttaccatgaatggctgcaatccatcacgtttggcggctcaccaggggtagacgatcggccagttgctgaaaagtcacccgccgcattcactggtaatcgttcgtccgagatccggcgcatgttcctggatggcgggcgacgtatccagatgacggcggaggagttcgcggataagttcggcgttcatccggtcgacaaccatttccgcaggccgttgctgaaactcctggagccgggagaagtgttgcgggtgagcctgggggcggggttgatctccgtctttaccgagttcgacgcaatgactggctcaaacatggaggctgaggcatacaggcggcagggcgctatctccgagagggaaaggattaagggtttagtggccgctcttgctgtagactttgccggacatgccctggccgggatttacaaggcgaacttgttcgcggctatcgatcttggattgaccgccagcgatatcagccaggaagcggccaccacgcaatagcactttttgttaaaacccggtcagagcgatcgggtattgtctttccatcgacaacgaaccgaggaaaacgaaatggtcactcttatcacatgggaacacgaaaacagcgagccagtggtgcgcgaattcgagaccgtagcggcatgttacaacctggcggcaaatggtggcttttacaaggcgcagatcgttaacgagttcggggttgttgattatgaattttaaggcgagcgacgtaaaacctggcgtggtctacggatcgcgcctcaataaccgcctttggcggtgggacggcgaaactatgtggactaaaggcgagggcgatgttatctggcatgaatgcggctggccataccccaccatgagccgcctcgatatcgcttattatctttcggttggcgatatgcacgagatggaagatagcactttttgctaaaacactgctgtcgagatccggtattatttattcatcgacaacaaagaggagatgaaaatgagcaagaagaatccatattcaaccagcaactaccataacgaacacgtcatgcgctggcactggcagaaactcaaagaacgccaccttgcacgccatggcaaataatcacaatagcgccgcttcggtggcgctgtatcccaaccataaaaacggcttacaccaggaggattggccatgccacgattttcagcaacaacaaaacttcgcaccttcgccgggatgccgatcccatactcatcaaccaaagccgtccagggcagcgagcacggcgtatacttccactggtgcggcaagtggcgcttcaccgtcattcgcggcttttacgtgacctgcgaccacgtggatattaccgactattccggcggaaaccaggttcatgagttcaataggcacgaatagcactttttgctaaaactcgatcggggcaatgcgttattattaccccatcgaaacagaggagcaaaaaacatgattggcaaccacaacaacgaactgaacgcagcagcccaccgtcgcgccgtcgagcagaacttcaacgcgcttaaagtagcctgcgatgagatgaaagcaatgcttgaactgccgtcatgggatccccaactcgaagactattacgacggcctccgcgtcaagcgtgacgatatcatcaaccgcctgcgcctggctggaatgtttctgtaaggagaacgcaatgattcacgaaattaagtctggaaaacaagtagtggccaccatcacgcagcgccacgttgtagcatttcagtttaacatccccggcaccaacgatatgcagtctcttgacgtgccagtttgggctaacacgatcgccattgatgccgacggctcgatttgggcctacgagtcgaccgccgaggatgtttgcatcccggactactcgcgcaaagcctgggtggattgtgggccttccgaaaacaagatgcggtcagtaggggagatggatcgcttccatgattgggcagaatcgaagattgaccttcgcggcctgaaatagcacgcattgctaaacgcccggtcaagggatcgggcataatcatcacgaagtctattaacaaaccgattatgcaaggagacagaagaatgcaacaatttgaatctcgcggcaagacatacaacctgccggacactgctacccatgccgcccctggtgcgtgcggcggcctgtattttaaggatggcgatagttggtttttcatgggggatgtggttgggggtgtaccgacgaagacaggcagcttactcgtgggcttctacgatcacgacttggtggagttgaagccaaagcgcgtaccgttcgctttctggaaaaaaatcaaaggggcgatctttaaatgaatcaattcgaattcctggcgcgtgcgcaccgtgcgcttgcaatgtacgccttcagcaagaacatgaagattatcagtgttgaggttgagttcaacaatatcagcatttccggctacgttggcgactcataccacgtgacgaaattcagcttcccatcgctggcttgcctggagcgtgaggcattcggtttctgaatagcactttttgctaaatgcccggtcagcagatcgggcataatggccacacaccaaacaacggagattcaccatgattcgcactaccagaccactacccaataacctttacgccacgattggggttcgcgcggtgagacttattcacatcaacgaagttggcaacgtggctattttgtggtttaagcgccactcaagcggtgttggcctgagcattcaaagattcgggcgctttaacggcaactcccaaacccattctcattgggttgatggctcatactgctggacgcacgttaagcacgtcgagaacttcgacgccaaatcactgagcgacgacgacgcctggaagatggtaacagacctcttcggttatgatgcctgcatggaggtagttggatgatacgtttatcagacttcgatcgccactgcttaaccgggcaatttggcgaaaagccagtaatgtgcaagatctcgaaggtaaaaggcgaccccgtcgagcaggtcaatacgcttaaaggcctggcaatgcgcaaccgactttacatccatgtgcgcggcagactgttcgcacagcaggttcatttttcgcatgggacgtggttctacactggcggggacggggttggcccatcgcagaaaagggttatgctgcgcgagataatcgaacacggttacgtttggactaacgggatctactaatggaaacggtaaaagtaatttgcacgcacgctggctattcgccgctatccacctatttcacgcctggccgcgagtatgacgccatgttcggccccggccttgatgaagtgtggattttgcaggacgaccagaacaccacggaagacgaagaattttggccagcctgccgcatgccggacgaaaagatcgccatgtacgccaataggccatacgaaaacaacgttttgtttgaggtgaaagtatgaaagtaagcaaaaagaaactcgcgctgtattgggccttcttcctggctggccttgccctgcataacagcgtgggctggcagacgatcggaatgctgtgcatgattattggtgtatgccgactgtctgagattaacgggttccgccgtggatatcgggcagcattcagcggcgaaaaagaatagcactttttgttaaaactgccgtaacgtcatttgataaagtggcgttactgaagtgaaacaatccaatcaggagcaacgcaatgaacgataatttaatcgcactgctggaagaactgaattcctacggctgtgcatacatcgagctttctagcgaacacgttatcgaagtcattattgacgatgacgcagggttcaccaagttaagggtggctaccggggccgaagaggaattcgaagactgcggcatccgtgaagtaaccaaccttctcgaagttcaccaggtgaaggagatccgctaatgaaaaccgtcaaactaatggttgtcaatgcggcccgcgaacgtgaacgccaccttatcggctgcgtattcgatgccgtcgaggtaaaagactcaaaaggagactttcacgtaatacagggcggataccttaacgaatttatcgtcaatccgctggatactgacgaagatttgaccatccgtgttggtagcgagccggaaaacgcgcttttccacctgcgtaaagtatcgaaggcatcgcagcgcaagttgctggttcgcgcactgaagcgcatagcgaagcagcgcggctacaccgatgcatacatccgcaagttcggcacgttcgctggagtaggtgattgggcgcggtcatgggccgacttttatttcaacaaatccggcgaattttgttcagcgcatacggactggctgcatggcacggaacacgatccagttaacggccacgagtggtacgaattcattgaggcggaattagacgccctttgatagcacgaattgctaaaacgaacgtccggggatggtgcatactatccccacactaacgaacaaaggaaattacccatgaacaaaccaaaaatcatcctgatcccgtccgtcgattccgtggttaatacttatgctaaattcaccaaaggcaagcgctataccgcaaccgcatttaccaaatgttccggcgaaatgctgtacaaggtcagcgatgactacgggcgcgagtatcacgtaaacccaagatcttcgcactatcttggtggccatcgcttcgatattgagtacccgatcgaagattgcagtaagcgcgactcgttcacctacgatgacagccgttctatcgccattcgcgctgcaaccatcggggacgggtttattagccgggcctgcatcgttgatctgatcccgtccgataatcacgccaaagacgacgccgacacgctgttaaatgccgtcgttcgcgccggaatcggcttggagttaagtgatgcgtcgtgcgaatcattcatgcgtgaaccgttctcacgaatcgcggagcttgaaaagcaagttgcgttcctgactggtgaacttcaggccgcaaacagcaagatcgagaatgttcgcaaaatcatgcgtagcaagcctggccatgacattgaagattacgcgcgggttttgcgcatgatggccgacgcattcgccaaactttagcagtagcacgaattgctaaaacagatcaggggtaagctggtatagttaccccatcgaaacgaaacggagttacagcaatgaaaatcaaaatcaccaaaatcaacactcttaacggcgacggctcaattaccctggaagaatgcggcctcaaaatcggcgaagttcttgaggtcgacggccacttcaacgacggctcatactgtgtgatcgctccgcgcaatagcgagtttatccaggctggtgacaatatcagcgtaagcgcagacgaatgcgaggttgtggaagaatgagcaacaaatttgggtactgacttacaccattggaaccaacgaggggcgcaaatcgcgccgcctcatctgcgacaccaaagagcgggcgattaggcagcaaaccgttcttggtggcgaacttgtcgagtatctccgcaagcctgaagcgttcaaggtgaactggccggaaggcatggatatcaacggcgctttagcgagcctgcgtgaattgcagaacaacccgaagacgtggagcgactttcaatgcctgcgggcggagccggaagtgaaggccgaccagttcaccaatgttcggtcgcagcacgcggagtggtcggatcgccagttcggcgacgttgggccagtcgggccgctcaaacacctggcgaaagaggcgatcgaggccgccgaagcgccggatgacattagcgagttcgctgatatcctcatgctggtatgggacgcaacgcgccgcgccggattcagcgatgagcagttggctgaagcggtggcggaaaagctggaacggaacaagcgccgggcgtggggcgaggtcaaagatggcgagccttgccaccacgtaaaaaattaacgaaatcgaatgccgtttaaagcgcctgtaagccattctggctggcgcaaatttaaggagtacgattgtatgcctgaatactcgaaagtcgaagatatgccgattggtgcaacaattactggtatccgcatgagcgagtcggacgacgccatcaagccgctggcgttcccggttacgcaggtggagacggacagcagaaaagggttcatcttcatctacaaaaatttcaatagtccgctgcgggttgaagtattcatcgctcgcggaacctgggtagaatgggagaaggccaaatgttcggactgaatgaagcgcagtacaacgccgtaaagcgcatagcaaagcagatggccgcagaaacaaaagacgccatcaagaaggacaagaagacctacgatcaggtcgccgcgaagatgatcgataaacattgggcgcaaatcaacacgctggttactcgcggccagtttatatggatagctggctacctggaaggccgattcggtcgaagggatggcgagtatgaataaaaaacagccaaacgattcagtgacctattgacgcaatcgcgctgatcgggtaacgtgaaccatgtagacacaagaggcggtaaacatccgcaagcctggccccggttaggggcgtttacataggagttatgatgcaatataaaatcatgctcacagcaagaaaaatgggtggcttttgcaaatcctgcattcaagagttcagcatgactattgaggcgaacgacaccgccgacgcggtagagaaagcaaaaaagcaatccggcgtaaatctggatacgcataaaatcaacatcaactacataagggaaatcagatgatgctaactgtgattattgctcttttaatgctttttataggttatcacgtcggagcggctcaccttgtagagcgactttcaaagcgggtacatgaaggcacctttgctgccatgatgtacaataagaaaacggcacgttgggaaaaaattggcgatccggatggtatcgcaaaacgaattgctttttcgccgcttccgtatgttgactgtgagctatttgtgaaactacagaagacgctgaatcggcgaaacaaactgatatgacaaaagaacccgcttcggcgggtttttttatgcccgcgatctgatatactcgcaaatcaacacagaaggaggattacaaatgtctgaagaacgtagaaaacgcgtaacgaaatcgcactttgcaggcaactttaaagcgctatatgaaaaggagttcggcgtggtgctagggcgcacggcagagatgacgccggaacaattttttgatatcgcaaagcgttacttccagtgggccgaagataacgcaatcaaggctgcggagacggcaacgtttcagggcgacgttaacgagtggggagtgaacaagcctcgaatttttacgctaacagggttaagcctgttttgcggcgtgaaccagtcaacgcttacacgctatcgccacgatcctaactatgctcccgtcatggagttcatcgactccgtgatctatgagcagaaatttcagcttgctgccgtcggcatgattaacgcttctttcgtcggaaaagagatggggatcgataagccaccagtgctgaacatcgacgctatcgccggggataagaacgagatcaccgaagagaggttagagaaggcagtgaccaatattcttgataagctgtaagggtcagatatgaacgaaatgatcatttgggaagacctgtcgccagccgataagctggcaattaaggcgcttagtacgcgcaacttttcgctattcatgaagatctggtttcagatcatccagggagaaaagctgatgtggaactggcatcactcctacttttgccacacggttgatgaaattatcgccgggaagcgcaagagcacgatcgttaacgttgcgccaggctccacaaagacggaggcgttctcaatccacctcgcgccgtatgcgtatcttaaatgccggaaggttcgaaaccttcagatctcgcagggtgacgcgctgtcaaaaggcaactccgatcgcgtgattaagatcttctcatctaacgagtggcaggagctatggccatcaaagttcgggcgcaagcagatcgatgaatttcaggtcatggacgataacgaccgcgtaaggctggaaatggtctcccgttcgtccggcggtcagatcgtcggtaagcgtggcgggtacatgacgccaggtttcagcggccttatcgcgctggatgatatcgacaaaccggatgatatgttctcgaaggtgaagcgtgagaaaaaccacgtactcctgaagaacaccattcgatcccgtcgagcgaagaagaagaaaggagacgaaacgccgatcctttccgtgcagcagcgattgcacgcgcaggattccacctggttcatgatgagcggcggcatggccatcgacttcgatcggattgttatcccggcgatggtaacgcgggaatatggcgaatcactccctgactggttgcgacctgagttcgagcgcgacgtgctttccggcccgtcggtggtaattgacggcgtggaatactggtcattttgggaggaaaacgaatcgatcgagaacctggttgcgctacgcgaagccgatctttatacgttcctttcgcagtatcagcaggaaccgatcgccctgggtggcaacgtgttcaagtcggagtggtggcgctattacggcgattccgacaaggcgcacgagccgcgcccggacaagttcgaatatacgttcatcacggcggacaccgcgcagaaggtcaaggagctaaacgactactctgtaatgtgctattggggcaagtatcgggatcgcgtctacttcattgacggaattcgcggaaaatgggaagcgccagatctccgcgttcaggccgaagcattcatcaagcagtgctggcgtcggaacaaggagtgcggaaaccttcgccggatctacatcgaagacaaggcgagcggtacaggtctaatccaggatttaacgaaggcggtaaacggcatgggcgagatcgtcccggtgcagcgcgataaagataaggtcactcgcgctatggatgcacaaccaatcatcaagggtgggcgtgtcgtgctgccggacaatcacccattcgttgcagagcttgaggcggagatgagcgcgtttacatatgacgattctcatccacacgatgatatttgcgacaacgtgtttgacgccgcaaacctggaaatgaacctgagcgacgatccggtagagcgaatgaaacgccttgcgggattgaaaaagctgggtcgctaatacataatgtgggcctgacggcccacacttaaacaaggttgaaatatgaataacattaagatggacgactataatcaaatctttaatggtggcgctggttatgcgtcaaccctcgcgtctatcgcggcaagatttggaacaatgtcgcaggttgaagagttctatcatgaaaacggcatggcgaagaaaatcgttgacgtgatcccggaagagatggtcgctcccggcttccagctaaacggcatttcagataacaccaagtttcaatctgaatgggacgggttaaatctggagccgcaaatcaccgatgctctttgctgggctaggctgtatggtggctcctacgtcctggcgatggttaacgatggtcgcgcattgacttcggcagcgaagcggggtaagccactcgaatctatcgttgtttacgaccatgattccgtttccgtcgcagaggaggaaaccagtccgcgaagcccacgattcggaaagcctaaaatgtacgaggtgaagccgctaaacggcgggcaaccgttcaaggtgcattatacccgtatgcactacatcgacggcgagcgcgtaaccaacaaggtgcgcaagctaaataatggcgctggtggctcggtgctgaacaagtcgattattgaagcgattcttgattacgactattcggaatatctggcgacgcaactactgaagcgcaagcagcagggcgtttggaaggcgaaaggcctggcgctaatctgcgacgacaaagaaggcgagtacgccgcccggttgcgcatggcgcaggttgatgctaattccggcgtcggaaacacgatcggtattgatgcggacgacgaagagtacaccgttatcaactccgatatttcaggcatcccggaattcctttccgcgaaaatggatcggattgtcgccctgtcaggcattcacgagatcgtgctaaaaaacaaaaacactggtggcgtaagtgcaagccagaacacggcgctacagacgttctacaaactggttgaccgcaagcgcaatgacgattacaagccgctgttagaattcctgttacagttcatcgtaacggaggatgaatacagcgtcgagttcgaaccgttgtcgctgcctaccgatgcggagaaagcggatatcttccagaagaacgccaacgcggctcgcagcctcgttaccgaccaggttattgacgccaacgaagcgcgtgatactctgtcggcgttgattcctgaactgaagctaaaaggcaacgctccgaagcagaaaaaacttccggatcgcgccgctggttcaggcagcacgcaaagcgcagagatcttaaacaacacggaggcggatgatgaaagttaacggcagaatcccaaactggcgttatcctgaagcaagcgagcgggagttatcccgctcaatgcaggacgcggtgacagaactcgtggtagaaatgcgggatcgcttagaccgccttaaatttgacgccacggctgaggaaatcagccaggcggaagacgatatcagcgaatctgccatcgtgttcttttccgccgtaattgcggcgctttcctccattgggttgactatctatagattcaattctaaacagtggcttgcaattgcgatcgcggctggcgggcggaacaacgaatcagttatgcgccttaaagaattcggtgctggtgggtatgaagactggtatcaggaatcgctaaataagtggcaggattacgccgaagcgtcaatcaggaagttagcaagcgatatagttgctgactggacaacgaaagttagaaccgccaacaacattggcaagtctcgcaagcagatcgatgaaatcatcgaaggtcgatacgctatctatggtagttggtcgcgcaaccgggcaagcggaatcatcggaacttttaacagtatgttgatgatgcagcgcctaaaagatgctaaagtatcgcattacttttggttcgggatgatggacgaccgcgagcgcgagagccatatcaagctagaaggtaagcgacgccccgttaatggtgacggaatcttccccggcgaagaatacggttgcaggtgctgggcggttccgtcatttgataatgaggatgattgatggttaactttaatgattactttaatcacgtaggaaaggatctgatatggaagcgagcaacatcaaaccgcgtaaaagttggtgatgttgccgggtggaaagatgagcatgggtatgtatacattagattcatgggcaaactgcgacaagctcaccggatcatttgggaaatgcaccacggcccaataccagaaggaatggaaatcgatcatattaaccatgtaacggacgataacaggatcgagaatttaaggcttgtaaccagaaaggaaaactgtaaaaacgtatcaatgagcgtaacaaataagagtggagttgtaggcgtgagttggtgcaagagaacaggtaaatggtttgcatccataagggttgataaaaaagagcgattcttaggtagatacgaagacaaaaacgaagccatttcagcaagaaaggcggcagaggcaaaatacaatttccataaaaatcacggagataaaaaatgaaaagagttcaaaggttcgacacggtaaagatgaaggccagattcgatgagaacggctttctggttgatactccgatcgtggcgcgtatcggtgcgcagacgtaccagacgccaaccgggcagcgcgtcgagttccgcccgcgttcggaggtgttcgatgctgaatcgctggcttcataccagggcaagccgatcactttgggtcacaagatggtgaacgcgcagaacgcaaaaggccttgtcgttggctcgtgctccggcgctggcaaagaagatgggattggtgttcttgttccggtgatgatttacgacggcgagtcaatcgagcaagccaaaaagcgcgtagctgctgagttatcagtgggctacacttcggtcgatatcgatcgcaaaggttggggtaataacgcaactggcgaatattatttcgatgaagaccttccggaaaacttcgaagagatgaaaaatgattccgtctctgattgggttcgctttgatgcagtgcagacgaagattcgcgtgaaccacgtagcgctcgttttccgtgggcgtgccgggattgcgaaattaaatcttgatagcgaacaagaattcccctatgatgacgactcaaaccacaaaggagctaaaacaatgatcattaaaattgacggcgtagatgttgaagtagcagataacgttggcgcttacattgcaaaactcgacgcgcaagttgcatcggcaaccagtcaggtaacgagcatcaccgcagagcgtgacgcacttcagaccaaagttgatggcattgaagatgaagtcgccgcccgcgttgctaaaatcaaagccgacgaagacgcaaagcagaaagttatcgcggttgtttctgccgctggcgtcaagtgtgacggcctggatgttaaggcaatgaaagttgcttacatcaaagaggttgacggtcgtgatctgtctgataaagaagattcgtacatcgacgcttcttttgactttatcgccaactctgataagatggctggcaatcgctccaaagtcttcggcaaaaaagaagatggcgagcaaaaagacaaaggcggcttaccgaaacttgacggcaccgaaatcatcgatccgcaggcaaaattccgccgctaataatttgcggccttcgggccgctaccagaccaaataaacaggagattcaaaatggcacagattccagcttcttattcccgcaagcgtgatattgccgtagcggggcagatcgctgatacgtcgctttataatatcgacggcacttgcgttgctgaaggcgatatcaaggctggcgtactggtggcttccactggcgtagtttccaatggccataaggtcgttaagccagcgaaagcagcgagcgacgtcattgtaggcatcgcgcagttctcgcaagcctactcgcctgaaggcaagtatgacgatgagagcgcggttaacgttatgactcatggccgcatttgggcgatcgcggacgcaactgttactgaagcagattgcgtgtttgattctttcgccacctttaccgcaaacggcaccgtagcgaagggtgatgccggggttatcaaaactggctacaaacacactggcgaatacaccaagaacgcagatggcaccgttctggtgaaagtgcaggtgcttcagggcgccgttgctccagcggctgcaactggcggcgctggcgtataaaataaggggcttcggccccatttttgcaccagaaaaaaacctttgacggcttaacgattcgtgatattcttcatctcgttaagccaaatacacaaacaggagtttttcagatgactatgaaattagatgcattcgaacagagtgcaattaaggtcgcaatgcagggcatgggcgtcgatgccgcaaaactggatgcttacggtatctggactgttaagcagatgactcaattactgaatcgccagtatgagcaggcatacccgcagaccagcgcacttgagcttttcccggtaactaccgagatctcgccgaccgcccgccgctttgagtggctcgaattcgacggcgtaacctctgcgaaaatcatcgccgattacaccgacgatctgccgaccgttgaagcgatggcaaaagagaagtcagggaaagttttccgcctgggtaacgcgtggtttatttccatcgacgaaattaaaactggtgcagcgctgggttcaagcctgagcgatcgaaaagcaaccctggcccgcgaaggtcatgagacgctcgtaaacgatctggtgttcaaaggctccactcctcacggtatcgtgagcattttcgaccagccgaacattaaccgcatgaccgccagtgctgcatggggcaatgattcagcggcggctgaaaaggcattcgaagatctggaagacctgcttaacatgatcgaagaaaccacgctgggccgccatcacgcgaccaacatcgtgattcctccgtctaagcgtcgtcttctgacgaaaaagatgccggacactagcggcgactcttatctgacttggttcaccaagaaccacccgaacatcaccattacggcgatggcggagttggaagatattgacggcgcaggcaccaaaggcgtgctggcatacgaaaaagacccaatgaacatgagcatcgagatccctgagcggttcaacatgctgccgatgcagccgaaagacctgcatttcaaagttccgtgcacctccaaatgcactggtctcatcgtgtaccgcccgctgactattgcgattctcaccgggatttaatcaaaagcgccttcgggcgcttttttattgcattgcattctgcaatgtgctttaatttgaaacctaaagtaaaccaatggagcattaacaatggccagtaaaaaagaaaccgtagaaaccgtagaaaccgcagaaatcaccagcgaagaacagacgccgcaggttgttcaactgcaaaacgttggtgcatgtgcaattcgctataaaggcacaaattacgtctatgagcaggttttcgaagtgccagaaagcgagatcgaccgattccgccacgaaatcttcaaaggccgcgtcgagttctacgacaatcctaaacgcacgcgcgaatacatcgcagcggtaaaggcgacagcgaaagagatcgtgcagcctaaaagcgcggaataacaaaaaccaacaaagggcgcttcggcgtcctttttcatatcaggagagcaaccatgaattacacaattcaagatgtgatcgataaaatgcgcagccttgcacctccgcttaaagaagttccagatgaactgctgtctgcatgggttgtgcttgccgaagaattcgtttgcaaatcccggttcggagactccatcgttacggcgatcgcgttgatgaccatgcatctaatgtttttggacggcgcaatgaagcaggaaggcgaaagcctggaatcttacacgcagcgagtggcgtcgttcaccctgaccggggagttttcccaaaccttcgatcgcgtgtcggcgtcaagtgataacgaaatgctttctacgccgtggggcaaaatgtactggcgtatgctcaagatgcgcggcggcggcttcggcctgcttaccgccgggaacgtgcgccgctgcggaatggttaggtgatcgctatgaactacaaagcaatccaggcacgcgcaagcgctggcattaaattcttcagcgacgctggcggcgtgttcaacaagtacacgaaaggcgctggcggaggaatcgatccggaaaccggggaagatatcattcctggcgaggtggtgacgacaatcaagggagcgatcagggatgttaatgaccgtgacattaacggcgaaaccatccttgctggcgataagcgcggttttttcactcatgatgtgccaatcatggaaggtgacgaaatcgaagtagacggagagcgctaccgcgtggttaatgcccgcccggtaaaaccaacgggaaccgtcgttgcctaccgtccagttttgcgcagggtggcgacttatggctaattacactatccgcgaattcacaggcgcaattgatgcgtggtgtaaggccgctggtgatgcgctggaggacgttgtaaggtttacgtgtgaagatattcaccgcgaccttgtaatgcgttctccggttgatacagggcgcttccgtggtaactggcaaatcacctttaaccgcgccccgctttacgcgattaacgcatacgaccaaactggcgaaaagacaatccagaacggcaaagccaacattgcactatacgcaaaaggggccgggatcacttcgatctggttcagtaacatgctaatctatgcgaacgcgctggaatacggccattcaaagcaggctcccaatggcgttatgggcgttgttgcgatccggttgggcgtttatgttactgaggcaatcaagcgagcgagggcgaaaaatgcattatgatatggcgttaaaatgcaaggcggcagtggctaaatttgccgccgagaacgggttgagggtcgcgggggataacgttgactttatcccaccgagaggcggggaaacctaccttaaagtctcctacgtcgaggcggattcaagatcggttgacctgtcaaggaaatgccgagtctatctggcgatggttcagattgacgttatctttaagcctggaatcggaaccgatcgagcgaggattatcgcccaacgcgttgcaaaatccttccctgaaggaaagattgttgatcgtgacggtaagttatatgtgagcgagtgggcggaggtacacggcgtgcagaagcacgaaacgggttggttcttcccggttcggttcacagtaagatgcgaccgcacggaggagagcggctatccatccaactagcggaacctcacgtcgcttataatttcttgccagcctggaaatatgtaggcataatggcggtgtaaaactttcattcaaacaggagtattcaacatgcatttaccaaacggtgctaaggtcttctttgagaaggctcgcggtgcgaagattccgtttaccgcaatgaccaacgacgcgaaaaacccaaaaatcacggtggcagatggcaagctgaaggtgaaagatattgtgatcttcaccgattgcacctgggacgacttcgttaacaaggtggctcgcgtaaaagcagtgacagcaggcgtggcaacgctggaagagttcgacacctccgacactaacaagtatcctggcggcgcggctactggtaacgtaagcgtgatcactgattgggtggaattgccttgcattcaggatttaggcaaagatggcaacgaacagcagttctataactatcagtgcttgagcgatgagcgcgaacaatccgaacctacttacaagtcggcagtgacgcttaactacacgtttgcgcacgattacagtaacgcgatctaccctgtgttgcgttcagccgacgccagcaagcaggcgagagcgatgtacatgtatatcccgcgagcttccgaggttcgttactggtctggaattgcatctttcgatgacattccttccacggctgttaacgagatggaaacggtaacgcttaacattgcgcttaaaggtgctcacgtcttccttccggttgccgtgtaattaaatggcggggcttgtgcctcgcctttttttgtgcataatagcgaataacacaaaccaatcaggagttaacaaaatggctaaattcaaaattcaaatcggcggcaatctcccttctttcaagctgcctgtaaccttcacttgccccgacggcaaagaagcaaccatcaccatgacagtaaaacatcgttcaaccgatgagatgaaagacttttatgagagcgaagataaagcgccaaagggtaacgccgagtttatccgcttcatggctgaaggttgggatctggatgacgaattcagcgatgaaaacatttcctggctttgcgctcacttcccggcgttcgtcatggcactgccacaaacttacatggccgcgctggcgggccaccgtgcaaaagtttaaggcgggctgtttatctcacgcttcagcctgagctaaccgatcgccagcttgcggagtacgggttaaggcgatcggattatgaagcagatcttgaaacgatctactttgatgaacagaccgcccaaagctggcagctattccaggccatgcaaacgcagtggcgaatcgggatgaatggcccgacggggcttgactataatacgttgcctatgctgttcgaattgtataaaatcgacaatcgagaagcggcattacttgacttgcaaatccttgagggtgaatacctgaaggagatttacaagaaatccaaataagcgcctactggcgcttttttcatatgggggcgaaacatggctgataaagtagctgggctaacgtttggcgttgacgtgtcgcaggttgataaagcggtacgatcactcgcagaactgaaaaaccaaagccagcaaacgggcgctggcctacagtcacttgctgacgctgaaaggcgggccacggcgcagaccgaggaaatgaaccgcgcattgcagcgccagaagcaagagactgacaaatcaaaaaccagctttagcaggatcgcaagcgccatcgatcccacgatcacaaaaatggccaacttgcgcaaagcgacggaagaacttgataaagcgtgggcgcttgggcttgttcctgacaaggaatttttccgcctgggagccatcattgaatccacaaccaacaatctacggcggcagcaggcggcgctaaccgaagaaggtcgcgcagcaatcgcagaggcggaggcaaagcagaaggcggcaaatgccgggcgtgattttgtcgccagcctgaaacagcaggctgactccatcggaaaaacacgcgccgaactgctggaaatgaaggcggcgcaattgggcgtatcggcagaagcggccccgttcattaacgcgctgaaacagcaagagcaggcgttaaagaaacagcaaaacgctatgggcctggctggcatttctgccgggcaatataaaatggccatgcgccagttaccgatgcagatcacggatattgtaacttcccttgcgtcaggtatgccagtctggctggttgcggtgcagcagggcgggcaaatcaaggacagcttcggaggcttgagcaatacgtttaaggtgttgttgagctacatcaacccgctaacggttggtgctgcgtcgttgggtatcgccctggcggcaatcgctaaagctggttatgactcctggagtgcgcaacgagaactggcgaatgcgctggtgctgactggtggctatgctgcgaccacaaccgggcagatcacagccttaaccgaagagattaacaaaaactcatcggccacgattggcagcattcaggaaatcgcaacatcgctcgccagttctggtaagtacaccatcaaccagattaagcagatcacgaagactacggcggaatggtcggcgcagacgggggagagcgagaagacgatcacagggtattttgatgccatcgtaaaagaccctgttaaggggcttgccgatctcaatgagcgttttaattttctgaaagagggccagctaacctacatcgaatctttgcgtaaaacaaaaggcgagacggcagcagcagatgcggcgacaaaactgtttgctgatactatggataagcgccttaaagatatcgcggacagtgcaacgccactcgaaacgatgtggatggatattaaaaaatgggcggctgactcgtggaagtgggtaggcgatcacacggtaggggcgctaaaccttatcgttgacacggtttccgcaatcatcaacacgatcagaaagctgattgccgacggcgacgccatgatcgcgcagttcatcgttgacgctggccgacagctacagaagatccccggcatgggagactttgggaatgactttctggcgcagcaggagcagttaatcaaggactcgaaagccaaatccgccgagcttgcaaaaaccattgcggaacagcaggcaaggatcgcaaaaggcgagatgggttacattgacgccgcgaaggataaaaccctttccggtgggtacagcagcaaaacgaaggatcgcgtaaatcaggaagaaaaagatatcctgaaaaaccgcaacgccaggaagcagcaggtagacgcgggcgttaaaattgatgagcagtatcaggctgaactgctatcgctacaggcgcagttaaaggttttgcagcagcacaaagggcttgatgacaagatcagccagcagcgcaaagactacttcgagacggttgctaaattccaggttttggaagaggcaagccagaagcgaaaactgacccaaagcgaacagcagatgctggcgaacaaaaagaatatcctgtacatggcggagcaaaaggccatcgtgggagatcagattgttcagcagcagagattgaacgccttgcttgacaagtcgaccaagtatcaaaaccagatggcggagaaaaccaaagcgctacaggataccgccggaatgggtagcaaggagcaggagagataccgggccaatgcgcaaatggcggctgactggaaaaacaacggcggatctttaagtgaccctggatttaaagcgatgcaggccgcaagcgataaattctacgcacagcaagatgcgcaaatgatgaactggaaggccgggttcactcatgcgtgggctgatattggcgacgaagttaatgacgtatacaccaacatcggggatatcactaaaaacacatttaacggcatggcgagcgtgctgactgattttgtaatgactggtaaagccagctttagcgactttgcaaagagcgtgatcactgacattaccaacatgcttatcaagatggcgctgtttaactcgctttctgccgcgtttggtggtggcggcacgttcagcttcgccaacatgttcagcaagggattttctggtggtggctacactggcgacggcgggaagtatgaaccaaaaggcgttgttcacggcggggaattcgtattcacgaaggaggctacgcaaaggttaggcccggaaaacctgtaccgactcatgcgcggctatgcaagtggcggcctggttggtggtaacgcaagttccggatctggaatcaccaacggcggcaacgtcgcagcgtcggcggctatggtgttcactatcggtgacattaacattacgatgggttccggtcaggatagtaaggggatggagcagggcgtaaggcagatcgtgaacgatatgttcaccgaggctttgagccaaaacgggcgcattgcgaagttcgtcaatgagaaaacgagggggtagtagtggattcctttaaatggtgtacacaaattcaaggaggggcggcaaaggtagccgtctccaacaacattcgatcgatcagtttcggaaacggctatatccaaacggcgtcgagcggcattaacaccaagcgccggacggttccgatcgtttatggcggttcagattgggaggaggtttataacttctgtcaggatcacgtaaccaagccgtttgtgtggaaggcacctgatggaagaatgggcgtattcgtcgtaactgccgactccgttaaccttgcgccgcatggtggcggcgtgtttgaggtaactgcggagttcgccgaacgcttcacttcagccggataatcaaaagcgccctttacgggtgcttttttttggcctatgatctggagtcaattagaggagggcttacgatgacagccaacatttcaaaagagtttacgaactgcttacaaaaacttttccccggcgagatcctgacgctgatcgatatcgacgccacaaagttcggcgggcaggtctaccgattccataacgagaacgtcgcctatacaaccgaggagcttttagcggcggtgaacggcgggacgcttcagccaaaaatgatcacgtttcgcggcgagcaatacggcccgcgcccgttcggcctgggcgggatcgcaatgtcgagcgatggcacagtggaaaagccaacgttgacggttagcaatattgatgcgcaggcgagtgctcttattcgcgcctacaacggcctcatgcaagccaaagttacggtatgggttttggtcaatgaattgctgcaaaacgacggcagtgttaaagagggcgattttaggcgatttgtttactacatcgagcgaccaaagcaagtagacccgcaaaaggcaacgttcgaattaacatccgtgtttgatatggacggattgatgatcccggcccgactgacgcaaaccgtttgctattgggcgcagcgcggctggtataaatccggcaagggctgcgactacaacgggcagaacggatacttcgacaagttaggaaacagggttgacgacccgtcgcgggatgtttgcggtggcctggtgtcttcttgcaggcttcgttttggcaatgaaccgttgagtttcggcggttgtgcgacagcaactttgaagagtggtagctaatatgttgactccgaaaattaaaatgcagatcatgcagcacgcgaaggaagtctacccgcacgaatgcgccgggctggtaacgcaaaaatcacgcgtgcaaaaatatcaccgactagacaatgtttctcaagatcctgagaacgaatcaatgccggacgaaacgcagtatgcgatggcgtcaatggagggggagccgatcgccttcgttcattcccatactggcgacggggcgaccacgattccgagtgccacagatttatgcttttgcgatgagtctggattgtcgtgggttatcgtctccatcccggaaggtgatatgcgaatcattgagccgaaacgccgacctctgattggtcgcccctgggctttgggcgcttacgattgctatggcctaatcatggattttcacaagcgccacggcgtcacgctaaaagatcggcgattgccgttcgaatggtggaagccggaatacaaagagaatctttaccaggattactggcaagaggacggattcattgaaaacactggcgagcctgaagttggcgatatgatcatcttccagattcaggcggaaaagtggaatcacgcgggtatttacgttggaaacaataacatccttcatcacgcgtttggcaagctgtctcgccgggatatctattctggatggtacgagcagcacaaggttttaatttgcaggcacaaggagcttaaacatggcatcacatacaaagacgattaaactttctggttcccttgggcgtaggttcggagtattccacaaacttgcggttgattcggttgctgaatgtatccgggcgctgtcttaccaggttgaggggtttaagcctttcatgcagagcaaggttggtttaaatatgcgcttcggcgttgtcgccgacggaaaaccaatcagcgcgaacgaccttgcgacttttgccgtggcgagggagattagaatcatcccgatcccaaaagccagaaagaacggcgggttgttgcaggtcgttatcggagcggcgattatggttgcggccttctttactggcggcggctcgctggcggctatgggcgctttttcgtcggcagcattcatggctggcggatcgatggttttaggtggcgtaatgcagatgatcgcaccgcagatgggcggcaacatgcgggcgagcgaatcgcctgagaataagccatcgtatgcgttcggcgggccgattaataccacggcggccgggtatccaatccagttgccatacggttacagattggctggaggcgcattgttcggttcgggatcttacgcagaagacaacaactaattaagccattcgctttttagcctgggggcgtagcctccgggctttttgtcgtgtacaattgcgatactattaacaggaggctaaacgatgactaatatcaaggcccgcaagggcggttcaagcaagccacgcactcccgtagaaatgccagataacctgatctcaaaagataagatcaagttattgcttgctgtttcggatggcgaggtggttaacgacttcagcctgaagcagttgcattttggaggcgtcccggttcagaacgaggatggaacattcaactatgagggcgtgattgcagagttccgccccggcacgcaaacgcaggactacattcagggcttcagcgaatcaagcgctgaattccaggttgctcgtgaagtcactcacaacacgccttatacgcttaccgtatcgaacaaaaatctttctgccattcgctttcgcctgttatggccgcgcgtgctgactcaaaaagataacggcgatatggtcggatcggttgttgagtacaagatcgagatggcggtagacggcgcaagttatcagacctacctaactggcaaaattgacggaaagaacacgactggcggttacgatcggagcattcgcgttaaccttccgcaaaacttcacgtcgcaggtgcttatccgtgttagccgagtaactccggacgctgacggggtgaaggttgtcgatgcgttccaggttcaatcatacgctgaggtcattgatgcaaaattccgctacccgttaacggccatgctttacgttgagttcgatagcgatctgttccagaaccagatcccaaccatctcactcaaaaagaaatggaaaattattcaggttccgagtaattacgatccgattaatcgcacatactccgggacgtgggacggtgtttttaagtgggcgtggagcaataacccggcatgggtgctttatgacctgatcatgaatcagcgctatggtttagaccagcgcgaacttggcatcccggttgacaagtggtcgctgtatgaggtggcgcaatactgtgatgaacttgttcctgataatcgcggcgggatggaaccgcgctatttgatggatgtaattgttcagtcgcaggttgaggcgttccagttggtaagggatatttgttccgcgttccgtggaatgacgttctacaacggtgaaagcctatcgattatcgtcgataagccgcgcgatccggtgtacctgtttacggctgataacgtcgttgacggcgttttcgttcggacgttcccaagcgaaaagacgatgtacacgtcgtgcaacgtcatgttcgacgacgaagaaaaccagtacgagcaggatgttgaaccagtattcaacccggacgcagccatgcggttcggacacaacccgaccagcattacagcgatcggatgcaccagaaggacggaggcgaaccgccgtgggcgttggattctgcaaacgaacctaagcgccacaaccgtttcgttttctactggtctggaaggtatgattccttcttgcggcgatgtgatttacgttgcagatccgcactggcaatctgcctttaacctggtgctttcagggcgaatcatggaagtatccggtacgcaggtatttttggcgttccgctgcgacgcgaaggctggcgacactctgatcctgaataccgacgacggcaagcctgtgcgccgcacaatcgccagcgtttcggcggacggtaagaccctcacgctaaacgttgggtataactttgacgttgcgccggacagtgtattcctgatcgagagcgatcagcttgcagcggaacagtatgtagtaacccggattgaaaagggtagtgatgacgacgaattcacctttgccatcactgctacgcagtacgatccgaacaagtatgacgcgatcgacaatggggtaattaccgatggccgaccaacttcggttgtcgacccggattcaatgggcgctccgaaagacttaacgattagctcattttctcgcattgttcagggaatgagcgtcgaaacgatggtgatcggctggtctgccgtgcagtatgcaaaactgtacgaggtgcaatggcgcaaggatggcggtaactggaacaacgtcccgcgcaccgcgacaacgcaggttgatattgaaggcatctatgctggcgagtatcaggcccgcgttaggtgcattggcggcgggaatgtagcgtctccgtggtctgctttggctagtgcatcgctgaccgggaaagtcggagcgccaaaaggcccgattaacctttttgcatctgacaacgagatcttcggcattcgcgttaagtgggccatgccagaaggggcggaagacacggcatacattgagctttaccagtcgcaaagcggaaccgatcaggacgcaagcctgcttacactgattccttacccggctgctgaatactggcattcaattttgccagctggctacgtgaacttctataaggctcgaagcgtagacaggatcggcaacgtttcagaatggactgattacgctcgcggtatgtcttcgactgacgttaacgctatcacggatgttatcctggatgagatcctcgacagcgacgcgatgaaagaacttcaggagagtacgcaggatagcgcggcaaaactcaatgactacgcgaacagtatcattcaaaatgcgctggcgaatgatgcggacgttagaataatgaaaaaggagaatggaaagaggaaagctgaaattaaacatgcagaagttctcatcgcaaatgagacggaagccagggtgcagcaggttaaccagatctcggcagaattcaacgaaaacctaaatgctggattaactcaagttaatgaggcactagccaatgaaactgaggctcgcgttacgtcggaagaggcgctttcagcaaggattggagagaactccgcagcgctagatcagaaactagactcatgggctgacgttaatggagttggatccatgtatacaatgaaacttggactaaagtacaacggacaggaatataattccgggatggccatgcagcttacagcaagtggtggaagcgttgtttcgcaagttatgtttattgctgatagatttgctatcatccgaaatgctgagtctggagcgtacacgttgccgtttgttgtgcagaatgaccaggttttcatgaataacgcgcttattcaggacggttcgattaccaacgcgaagatcggtaacgtcattcagtcaaacaactatgtttcaggtagtcgaggatggtcaatagacaaaaacggaacctctgagttaaatgaggtaacagtgagggggacaatttacgctactgacggttggtttaagggtactgtttatgcagagcatattgaaggtgacgtgatgatcgcagagtcaaacacgataccattcaagacatattcagatattgatagcggagattatgaaatactgaaaattcatggagaaaactttgataggagcatcgatacgaacctgattatacaagtgaattctacattcaggaatacttttagagtaattgttcagactccagggaagggggaaatagaattctacagtatagacactggaaatgacggaggtacaagagcatacgcgctacgtggcttcgatttaccagcggctggaagagggcaagagaataggatcatcgttagggtaactcaaagcgggaggggtagcagcataaaaacattcactccatgggttgagagagataatggaaccactggacaagaaacgcctgatggagtcatatataacactggttttatcagagagagggcatacatatcggcatacagaaaaggaaatagaatagtagtctagtgacaaaagcgcccggctgggcgctttcttttaatatgaatcatagatgtaaaaaaggggccgaatggccccttttttcttttgttgtcttgatatgcttgatatgtcatatcgcaacaaagttgatgttgtttttgtaaactcagattgtttctacatgagttagtctttgcagaccgtagatggtgtgaagcgtagcaaatgccatttagtgtatcctcttgtcgcgtctaataatgaatttttagtgattacattactgtaaccagccaatgttattgcctgaacgcccattgatatcgagcagcaggttaggtatgccagcaccttttgcattctctggaatgccaaggttaattgccccacgcctggttgatggtgggcttggaggcaacagcgcatattgcggtttctcccatatgttgccgattagggttgtcagtgcgctcagatcaggggctgtgctccatgcgtcagaccagataatgttatttttgaggataacttgagacgctggcgcaattgttctggttcccgttgacagttgtgcaatgatatctgaacccttcatccacttgcagtagaaaatgcaactctccacagtcagcgacggaacagatgcactctcagtgtcgtacccatttgttgatatcaggcgacgctgcttgacgcttgacgtgtcaataaacacacaattacggacggtattattgaactggttgcggtggtgagatatggaacatgcgtcgtttgtcggattcccaatctgcccctgcagcctctgaattccatcgttgaacgcgaaacagtattccactacgttattaccactcccctgccgacgtgtgtaataaaactcaaagttgctcatcccggcaggtggagctgcctgtagccctgcgttatcagcagagacaaacatcactgtacgggcgcagccagtggagtaaacgtatctgacaacgttatcccaacacataccgtcaatatcaaccgccatgttgtcaggtgccattggataggagccatgcacctccagtttttcaaacataacccgattacaatgccacatccagaaaggtgcgtcatacgccgacactcccccagtagtaaatttatcccaacggtacgaactgtagtagcagtcacgaacgcagctctgccactcgttgtccgtataggcgtcgttcttactggcacaagtgtgaattaatgccccctcctgtacaatatttgtaaacgagcagcgtaaaacctttgctccgtaagtacgggcggcatccccacggttatcagtggtatcagatacccaggtattgccacggatatagacaccggcgttaaccatattaaacatgcagtcttctacagtcattttatgtgcgggattagaaatatctgcaccataaccgacaccaaaaagctgaacgtgcctcccaatcgtgtttttattcggattgcttacagagtatgcattacctgtgaaataacagtttttcacatgaacatcagcaaccccatctgcatcaccagtgcattgcaggttaacactggttgctgctgaggtaaacccgtcatctctgtccataaaatggatgttccgcaccgtaacgcgacgggcattccacgatgctagttgccccgcagaatttgagatggatagccattttggcggcgggccatccccgtatgtgtcaaaaaaactcatttcagacgacgtgttcactaacctggcattaacggcctccttcaacactgtgccgcgcctgattagaattgaaaatgggtagctggtgattgctgcaatagcagcagtaacagttttaaacgctgatggaattggtttattttcatcatcagaagggtctacatataagtattgcatttttagctcctgttaagctggttgaacgtgcagatcgagccaatcgaaaccgttaatgtttgccagtgtcccggcgctcgttctaacttcgatagtgaaggtattcgtgccctgagatacgatgttaactatgtacggaggtgttccgaacgaggttcctgagaaaccaacgggagggcaaaccttccagtggtctccacgtaaattgcatccgctgataacgtactgacctgttgatgggttggtgacagcaattctcgcttcatttcctttattcgccagatgatattcaccacctatcgcaaaaaccccgtctgataatttatcagatagtcggttagtcacattcccggaaacgcgaactacagttcctggagagtaccgaacatcaccgttattcattttcacgtaaaaacgatctgtcgccattttctctgcgaacgaataaaccagatagtttggagtatctaccgttacattattccgtaagtcattatggtaaaaagtcaccacattggggtcagcaacattaatcggggtgaatgatattttttgcccatacgacggaagtcgcaggaatagtttcgctactgagttattttggtcattaaccaatcctaccgctggcgttaatgcagaatccccccagccagattggccgccatgcagcgcggtaactttcagccattgatagatactgccttggtcaatggacggggcgttattgagggcttgcgggttaaacgtgaccatgtaaacatttggcgtgtagttaacatagttgcctaccgacagaataccagagaccacttttgacccataccccgagtagttaacatcaaacaagcgataaagaactggtgataaattttcaactgtagggcattggtcaatcgttcgttgcaatgatgtgccgatgtcgaaactttttaccagcttgaacatctgcttatcgatagatgagccagtagggtatccaaggtcgttaaactggttggggctaaaaacgaaaatatcgataataccattatcgttagtggtaataagaaaacctgggcttaggtcatcagattcatttccagcagaggggaagcgaacaattttatcttcaaatccattatgaaaatatccagtgccctgcactattggtgttgaaatttgagcagctgataacctcccgtcaacaattgcatatgtctgaatgcgtccgcgctcgtctaagactaaggcagctttattattcggcccgccgaatactattccggcaacgcctgccgggtcgcctggcatctggtgaatttcaaattcaccacgcttaaatatacgctcccatactgacaggttaacatctccaacgctctctggcccttcacctgagaaaaaattaccaattttcatatatccgtcaggctgtgccaaaactacaagcgttgactgttcgccagcatcattgataatttgctgcacttggtctctagcagtctctgctgcaacctctgaagtttttgccttactttcagacgcagccgcagccgcagcgcttgattccgcagcttcggagtctgccttaatttggttggcaagattttgcaacgattcgaaatcgaactccttaaagaactcgactgcatccgcaattaccgtttcctgtgactgataatagcgaagagtttccgcaacatcttgagccaggccgtcaacggttagtgagtcacttaatagtatcgcataatcactagacgctacgacagcgccgtttgtggtaattgctttaatttcagtatcgctgacaaccttgtttactacggccatttgaattggtgacgacaaaaacataattgtcgctccagggcgaatcagcgaaagcgatgattgccactttgtgccagtgccagtaactgttccgtctgcggacatagccgctttgccttctctgtatagtgccatgcatttagtcctctttggttgattgagtaacgcagataatagcatcaatgcacagaaaaaaaaaggagcttttcggctcctttagttgttaaatcagaatgggatatcatcatcgaaatccattcccggattcccccagccgttttgaggtttaggcgcttgctgcggattgggttgttgaggctggccacacccggattgctgattgccgccgccgctttgcgcaggttcgcgctggctgaattcgagttgcggcataatcatttcgttgtggctgtaaattgtgccgttgtgctcgcggttcacgatctgaagcgtccggcaggtgacgctaatcaccttatcaatttgcagtgcttcgtcgtaccacttaatcatgttttctttggcaaagaaaacggcgcggtagttcgtgtaaaccgtttcgtcctggccatcacgattgcggatcttcattcgctccgacaggtctacggcgtacattttccacggcccgttattgttgctgccttccttgacatacggttcctttcggataacacctgttacaacatgcattgtcgttcctatggggcggtttcccgcccggttaaattagttgaaagatgaaatatcttgcgcttctggttcaggttttgattctaccttttccggctcacgtttcgcaacctcttgcggcttaccaggattgaagccgtttgccggggtgactttcagttctgcctggcgtttggtgatatcgtcttccgtcattttccattccgcaggcgttaacgtttgtttcgccagcttatagatctcacgaagcgattcgagatcttcgcacgcgtcaattcgttttttgaagtctttcggcgtcatcttcgtaatttctgcatcatcatccgcctgcttgatgccgagagctgcggccagtgcataacggcgggcgtaagatgttgttgagccgtatgcttgttcgacggttttactgatcggcatattgtactgaaacgccatgaactcaccgctttcatgcaggaacatcgtttcgaggtgcataaccttttcggtgctggtatccatcatggattgaatgaccataattttgtttttctcaagcgccggggaaatcgcgtcgaggatatccccaagatttgcataggtgttccccaggtggttgttcttcccgcttttcttcgcggcaacgaagccagattttgccttgattaatgctgctgcgatggttgtaaatttttcagatgtacgcatgataaagtttccttttcctgattggtaatgcgcactatatcacaagtgcgcaccagtgtttagctatttgtgccgtatacgtccgggaacatatatttcacgaactgcggagtaggcaaaacgacttccgccgcgtttgactcatatgatggccatgaatcatgcttcacgcattccgcatactgatgaatcacgctttgatactgcttgcgaccgatatcgatctgctggctggtcagggtgaacgcaagcggagcaaacggtgattttttctcctgcgttagcagtctgacaactaccgggcgtttttcgttgtaggtcttcacgaacagatcgcgctgcaatgccatcttgagatagtaaccaaggttgaaagcgagccgcccgaaatcgtcaggcttggaagattgcgttgttttgtagtcggtaatcaccacgacctcgaaaacttcatcagggttgaatccccactctttgattagttcgggatcggaaacaacgtcaacatgatctagtcgaaccttaaccttgacgccgaagatctcaccgaagatcgacaattcacgctgtgcggtaggtgattcgatacaggcggcgtgtcgcgggttggccagcatcacgctgcgcatttgaacaaccgcatcgaaatcaacatccctaaccagcttccgcccggagttcatcgcggcgctttcgtcgcatagttcaatcgcccaccaaacatttacgtcaatcccggcgcggtatgccatctccagaagttccgggtaatccttgttggacgtcccaatcaggccacacgctttcagcttcgcagacagtgccgacttcgacgtaatcagatctttaacctcgcccggagaagtcgcccgcaggtactcgccattaaattttgccgtctcaagcatacaggtatgcgaacaggttccgaacgccagcgcggcggtttcctcgcgcaccttgaatttccagtgcgccggggatgttgcgtaaatctcgccgaggcttgagccgctaacgtattccgcgcaccaggaatcaggatcgtgatattgctcgttagtcaattcactgcttgtgtatgccctgaaaattgcttcagccattgatattgctccatttgtggtttcgttgcgttaagtatacgcatgacgattacaggtgcaaggcaaaaagtgctattcgcaattggttaaaaaatgagcgaaatttacgtaagatttagtaagatgcatcttacgtgactttccccatacatttcattgagttaatgcaaatcggtaagatggtaagatccctataggtaaatatccacgaaaaatctggcgcgggatcgcaaagcaaaagacacgtacccggagaaaccttaccaagataaatatagagagatagaacaataataataatattattatttatcatatacttactatctatatatggcggatagttggttaaattttgcgcgaaatttacgcaagattcatcttactaaatcttacctaaagtggttcgaccagttgtaagccactgaatttcaggaataaaaaaaggtaagactgattttgctcaatcttacctaaaatctgatcaatatttaatcagagaagcgacgatgccttgtacaacttacgttcaaatccgagcttaaagttgtcaccgttcggaacgataactttaagatcccgatcgtcagcagccgccagcatatcccgatctccacgacggcaaactacccgcatttctcgcttaccttttccgcccttgcctttatacctgtacgccacgatctcgacgtttgaaggtatgatgcaggcccaaacgtcgcacttgaacgaactagcaatattgaagtgcatcgcctcaatccaggattgagcaaggtaaattggcccgttaccgtcgtcgctctgattggtcactatcaccgatccgaaggtcagatcgccagccaacatcttctcccgaccctcctcatcaatgaacagcatgttgcaatactcatcatctggcccatcctcatgcacgagttgcattggtagcgcgtgaattagctcctgtctgccgttctcgtgagtttttacgccaacctgatatgatttgatatactcattttcaatgccctcatagagcgttacaggcgtgctatcgacggcctccgttctgtttaaaactgccatcactctttcatgatctgccatctttccgtagtcatacccgttatcacgagctacctgcttgtttctcttgaccacgtattcttgcggaaccttgccgagatagcgcccaagaatgttgatgcactcgctatacggctggccgcttaacttcattaaccagccgatccccttatcagcaccgcagcctccacagtatgcgccgccgtctccgcgcgtttctaacttgtcagtccagcggaatcggtctttgcctccgcagttcgggcagtcctggtgcttgccgttgaagtatcgagagtggatgccgcaaatgttctgcaacgcttcgcgccacatgccagccatgtacggcaaaacctctttttcatcgtaaaaatccacgtcgttacctccaaataaaaaaacgcccacacgagaatgataacccggcaggcgtttagtgtttagacaaattgtgctatcggactacgcggagcatttcgcggcggtcgcatcggcgcgtcactggctttccgttgctgtcaaatcttaaatctggtcggcagaatgaggcgcggaatcctttgcaattgttccgtcggtagctcttatgtacgagataagcgccatcggctgagatcatgccgcgcttacgccactgctgaacaacctggatactaacccccaactcttttgccgttccagcgatgccaccgaaggcatcaataaccaactccatccgcgcagtcaacccggcgcgaacctcatccttcagcacgtagtaaccagtcggtcgcttgcgtttcttcttatctttcccgcgcgatgttccgttgttgccgttcaaggttcgcttatcaacctttgccatttgttccataatttaaccctcatagcattttttgttaaacatgataaaatgttccctgtattatacacgcaactatgcgaatgacaaattaggattgcccatgctcacaattgaacaacaaattgaagcctacgcagataagatcacgttaatacaaaagcgattcacggttggcaatatcgttccatacccatatcaggcggtggcgtatattgagacagcaaagcggatcgcaaaatatgaacatccgttttacattaaggcttcggtttccgccgggaaaaccatcatgatcgccatgctcgcagcgcagtgcaaggcaatgaacttacccatgatggttcttgctcgccaggccgagatcgtgaagcaggattcagaggagatcagtaacctcgacgttccgaactccgtttattgtgccgggttgggcacgaaggcggcatacttcccgatcgtcgtcggatctgaagggacggtggttaatggtctgtttaaaatgctgggtgactatacaccttcagttctggctattgacgaatgccaccaggttgactggcaagatttggcggaggcgatcgccaacaatgaatcgttcgagtacatgagcagaccgaaggataagccgtatcgcgtgaacggtgaactggtcgatgccgaccacccatacgacgaaaaattcgactacgtagaattcggcggcggtcgaacacagtacaccatcgtcatttgtgagttaatgcggaggtgccttgagaagacagggcgagaacttcgcatcgttggctatacgggttcggagtttcgcggcgtcattccgattttacaggaagacaagagccagcctggtttttggcgcgagcagatcaccgacattaacacaaactatcttgtcgagttcggatcggtggttccgacaatttttggtgatactgaatccgaagggttagggtatgacctgtcagaattccacggttccagtcaggacggtacgcaggattttagcgcggaagaattgcgcaagatggaaaagaaaatccatgaatccggcgaaatgacgaagctgattatgcaaaaggtcgtggagcgtgcgaaaacccgaaacggagttctgataacttgcgctggacagcggcattgcaaggaggcggcgagctatctaccgccggacgcaacatacgcgatcatcaccgaaaagacgaactcaaagaaacgcggcgaaattttggataaggcgaatcgcggggagattaaatacatcttccaggtgatggccctaaccactggcgttaacgttccgttttgggatttttcggtgatattgcgcaagatcggatcgcttacgttgcttattcagcttttggggcgaggtatgcggcttctaaaggactggcaaaaacagcctccttactcgtgggtgaaagaagatcaccttgtctgggattttgccggaacaatggatgaccttggccagttgtatttcgatccgattttggagcaggcgcaataccaaagacgcaagagcagcaagaacggccccaaaatttgcccggtatgcaagggagaaaatagcgagtacgcccgccgatgcatccacaaagacagcaacggcaatcgttgcgaatatttctggatatcgcagcgctgcgaagaccagaaagacccgcgaacagggaagattaaggtaaaaggttgttacgccgaaaacgatattgttgcccgccagtgcagatgttgtggggtgcagcttaaagatcccaacgacaatctcaccgggaagcattatacgcagaatgactggtatgatgttgtcgggttcgatatcggcttgactcgcaatcagtccgggatcatcttcaattacgtgttactgaaccatgacggcgagcggttcaccgccagggaaaagttcttcccggaatcagagaatcagatttgcggcaagttgtggcggcaaaaggcagtctcccagcacgttgacgacgcggtaatgcgtggcaagttgggcggtatgaaaaacgcccgcaagatcctggagtatgcggaatacttccgcgcaccgaagcgcgtaacgcatcgcatcaacggcaagaaggaagatattatttcacgcaaagattttggagacgcagaatgatcgcagataaaggtgattatctcgaatactacggcgggcctgtgaaggcttgtccgcttgagaaaatcgatcagatgaatagcgtttcgtggctgcggcacgaataccctgattatctgttctggcacacagtcaatgaaggcagcaagcacaaggcgagcgcggttatcgatcatcaaatgggattgcttaaaggcgttagcgacttcgttatcctgattggtttcggtggcaaatacccgttcgcagccattgagctaaagcgccagggtaaggcgcaggcgtcgccagtgagcaaggagcaaagggaattccttgctgccgcccggcgtcgcggcggattcgccgccgtggcctatggcttcgagcaattcaagattgctttctgcgatgccataaaatagcactttttgttaaaaccgcccggcgaaagccgggtatcatttccacatcgaaacgaagaatggagtgttgaaaatgaaaaagatgctggctttagttgttctgtctcttggtcttattggttgcagcgaaaaaccgaaaacatatgattgcggtggtgaagcgtttgaggtaactagcaactatatgaaagttgtcaagggtgaaaactctggcgttataattgatggcgctggcgaaaatcaatataaactgcttactccttttgggtacgctcattatgcagtcaacaaaaacactattgatgttagcgtgggcgcttttcacaataccttaacctgcgaggttaaataataatggcaaaagatatcgcagacaaagacactcatgacgcattcatcacgtttgagcaattggagcgcgaaacgtttattggcaacgcccttgccactggcggacactatcaagccgtcaggccagataagttctatcaggtaactggcaaccgatacgcaggtagtaaaacgccggatattgtgcgcgacaagtgggcgacagatcgaagtctgatcgcatacatggaagagcgttacggcaattacgatcttgatgtcgccgcagaccgaagcaacgcagtttgcccgaagttctacgacgaaaaaacggattgccttaaacgctggtgggggaaaaacaagcacatttggctgaatcctccttactcgtttccagatccgtttattctcaaggccattgagcaaatggagcacgacaaccagatcgacattctgctacccggcgacaattctactgcctggttccgtgacgcgcagaagatggccgccgaaattatctggattgttgccgatgttgaagaggatgattacgggaacaagttaagtcgatccggtcgcctcgccttcatcaatggattaagcgggaatccagtcgacaacaacaataagggaagtgttattttcatcatgcgcaagctcaagccgggagaggagcaaaagacactttacattccggtaagcgagatttgcccgtcattagctaaaaagcgtatgcgcaaacgtgggatctgaaaaatggaacagacagagtctttcgccgagtatcttcggatcgttgttgaacttctggacaagcacggcttcattgggacggatgaggaaaagttagcctttgctgacaccatcgacggaacctacatggagttcatggacaacggaaccccggtcgctgactggccagaaattcttgaacgagaattgattgagtttaaatcacatgaaggcgcggagtatttcgcaaaacagcactaattgctaaacaatacccgccgcgtgcgggtattattactccaccaaccaatcaggagcaaacgccatgaaaaccaaaaccattgcagacaccatcaagatcgtaccagtaaaagcgcaagtggtatcgcgtcaactggttaacctgtctcgcctgtgcatggccgactacatggcgaacccttcagataattgccttgatggtgtagtcggtgagatttattttcgcgctggttatggactggaaagcgtggccatgtatgagcaaatggccgaaggtttttgcatttacggtgacgaatgatgattgtcgagactggtcgcgctgccgtatggcagcacgcaaaagaagcgggaataagtgatgatatcgtgaagatctcaaagtatttcgatatcaaagatatatcaattatctttggtgggaagctcacctatctaaacgagcgcccggtgaagcgcacgcgaatagcagtggcaacgcgtgcggaggccgacgcgctgaagatgttcatacatgagtcgaaacagcagaaaaaatattacaagtagcgggggcgtgaagaatgcgatatattgcgatcctatttacggcgatcctgttcacgatcgcaatcatgaactgcgcaattcaattaggataaattatgttaccgaaaatcacagacgaagaattcttagccgcccgcgaggaaggtaagacctaccgcgagatcgcggaagagttcggcatgaacattcgaagcgttgaacgtcgtggcgttcgcctggcacgacaaggacacctacacggaaacgcccacgtttcgaagcatatcccggacggcttcggcgtcaaaggcacgtcgacgatgattcgcgcggacggctccgaggtcgttcggtgggtcaagtcggaagtagacagagatcgcatggtcgcgcttatggaggcggcgcaggcggctttctgcgaagaccttccgcgagctgaaccgcaaccgctggatgagtcgaagttctacattgaagatcagcttgccctgtacccaatcttcgacctgcatattggggctatggcgcataagcatgaatgcggcgagaactatgataccagcacggcagagaaggttctaaaccgcttctttgattattccgtgtcggtggctccgcaatccaaaaaggctgttttgctggttggcggtgacttccttcacagcgacggcctggacgcagtaaccccggcaagtggtcacgttctcgatcaggacagccgatacgcaaaacttgtttatgttgccatccgctcgctgcgtcgcgccgtgtcgctactgcttaacaatcatgccgaagttgaagtgcaggtaatcgaaggcaaccacgaccaggccgggatgatttggctacgcgcagcgctggcggcgttctatgagaatgaaccgcgcgtttttgttgatgttagccctgcgatcctgcatcgcaccttgtggggcaaaaccatgctgggctacacgcatggccacacgatgaagaagcctgaaacgcgccttgctgcgatggctaccgacttccgcaaggagttcggccagtgcgactacatttacacgcattccggccactggcatcaccagactgtaacggaacactcgttaggtattgacgaggtgcatggccagttaggggccaaagacgcttacgccgctcgcggtggttggcgctcctatcgccaggcggcggttattctgtacagcaaagaatatggcgaagtaggccgctttatctaccgcccgaacatgtaaccacaacggccccgcgaggggccaacaaggaaaaccgatgaatagaaatatctgcattttcgatctcgatggcacgttgtccaatggcaaccaccgcttgcacctgctgccgaaaaaggatctccaccttacagaaagttggagtgaatttaatggtgcatcaattggcgacagcccaatccaaagcacaattgatgtagcgaatgcgcttcatcgctccgggatgattgtcgttatcctgaccgggcgatccgatgaggtgaagaccgaaacaatgatttggcttgaccgttacggggtgaaatatgacaggctcatcatgcgtcgcgccagcgacaaccgtaaagacacggtaatcaaggaggaggagttacgcaaaatcggaattgatcgcattgttgcggcatgggatgattcacccaatgttattgcgcacttgcgcggcctgggtattacgacttaccaggtctgcgactacggagacaatcttcaagatcatttaaaatcgcacggagtagacaaatgaaaaatgtaattattctcaacggagcacccggaatcggaaaagataccatcgcggaaattatctcgcggaagtgggaatacaagaaccttagcttcaaacagcctatgtttgccatcgcgcgtgctgtgcttggatctactgattttgcacgctttaccgccagataccacgaccgcaagcacaaagaagtgaaatgcgattttttgggcgaccgttctccgcgtgaattcatgattcacattagcgaaaacttcgtcaagccgaccctgggcaaaaatcagttcggcaagttgctttgcgattcagcgctaacttcgccgtttaactgcatcgtcagcgacggcggttttgatgaggaggtcgagcacgtcgcagcgcatgaggcgcttaacgtatttgtcgtccgccttcatcgtgacggcatgacctttgagggtgatagccgcaaacacattcgacgacccgatctgatttgtgacacgtatcacgaacttgattttgatatgaccactggcgagcctgaagacgacgcgcaaaaaatccttgatatggtttcagatgttgcattaaaattataaagttaatgcctttattatcaccaccttaacgattgggaaccttgacgggttcccttttttttgttcttaattttgccaaatgaatatatcatcaccttaccatttaactaacagaggttgcatatcatgcgggaattcatcaacgcggcaaccaatagcagcggcggtgttgcccttgcgggatctgcatccgggcaattaatcattgctgccattggtttatttttcatgatcttatttggctcaatcggcacgtggctgaagtggaaagactcaaaagccatccgggaggcgattgattctggcgacattaaagaggcattgaggatcaggagcaaataaaatgggaatgaaaacgcggcttactttcgcggcggcggtggcgatcgcggtcgcgttcctccccgaagtggaggacactaaatacacggtttatacggatatcgctggcgtaccaactgtatgcgaaggaatcacaggcccggacgttatcaaggggaaaacctatacccggtcagagtgcgacgcgcttttaaccaagcatatccaggtagcaaagcgaaccgttgacagcaaaatcaaagtagatgttcctgacaccttcagggcgtcgatgtacagcttcacgttcaacgctggcggcggcgcatattctggcagcaccatgctgaaattaacgaaccagggccgattgcgcgaggcgtgcgagcagctatatcgctggacgtactaccgcaacccgaaaacgggtaagatggagaagtcaaaaggcttgcataatcgccgggttcaggaatatcaactatgcattaaggatctaaaatgattaaggtaattggtgtggctcttacggttgttcttctgtctggttgcgcttccagtgtcccgatcctttccgatctggtgggcagcaagccggatatgacggcgcaagtaggcgcggagaacgttaaacaggcggttggcgtgacgaacaaaacggacacgtcaagcaagcaggagactacgttcaaagagtcggcggtaggaaaggttgacacgtcgaacaaaaaatccgtaacgacctccagcattcacgccaaccagatcacggcggacaagatcgagatccgaaacgatgaaagcggaagcctgactccgtggctgattggtggtgttggggttgtaatgctggcgataggtgcgttcggtctttggcgggaacgaaaaaacaaaggggcgtaatgcccctttttctatatgtaccgcttgacgtgcaatagcgctactccgtcttcatcgttaagaccatgttcaaccgtgttggttgcagccattccttgatagagcaagatgagcgcggcacgcaagtaattttctggtgtgatctgtttcacacaaacaagcctgtgaacttccgttatcagatcttccacctggtttcccgaaaagctgttcatcactgagttggtcaaggtgcatcatctcccatatgtatcggttatccatcccttcgaacgaccggaaatcaaaacctatttccctgttatccggccccgtacaccacacagagccgttttttccgtcaaggtatccattcgtatagcttcgcgctaaaaactccttagagaccattgaggcgaacatacgttgcgatacgttggcggcttttgccagtcgaggcgcttcgcggtgcgtatagacgaacttcgcaaaatcctgccgggtgaactcccggcgagattcgcagaacttgtaaatgtcaagaataaacatcaattacctcatgaacgacgggttgataaagacttcggaatccatcacgcagataaagcctaattcctccatcttcggcaataagcgttccttaatctttttgctcaccccggcctggcctttgaagatcttcaggttgcggcaggcgttataaatgccctggacggtcataacaccttttgcctgtttgcagcgactggcgataacgtcatacatcgctttaatttccgctccctcaccagcaaagccggaagagtcagccgacgacaaatacgttttgctcaattcatggaacataatgatcgcttcgtcaatggtcgccgtgtcgatcttcttcgagcgcttcccgccgggttgccagttccggatcgtgtgaatcacggacgccagacgcataacctgcttatcaaacttacccatcgcgccgcgaagcattgtatgcgaatacttgccgccgtcgcctaactccggttctaactcctggcgggccttgttcagcctacgcattgccgcgtcagtaacctgcaacttaatgttcgactcgctcataatgtcatgaatcagccggaagtaatccgccttcagtgactggtcgatcggctcataggtcgaattcccgttttcgtcgatgaacacgcgttcacccaaacgggtttgctcacgaaccaaaaggaagcgttcagataccccgatcccgcgagagccggcctgcataatggcgtcgatggtttcatcctgggcaattacgcaaatgcagcccaaagcctcgaatgacatattgttgctaacgtcggcacgagcgatcgatacgtggcctttatcccatgctttgagcaccagttcgctgttcgtcttcttaccgccatcgtttccatacgtgatccctaaaaggctgttaaccgccgtcgcctcatcggaaataacggcaaagtttccctgtcggttgttaatcttcgccagaccttccggggtggtatcagataccgggaaagttaggtcacacaatttttctaacttctcctcaagttcgtcacggtcttcaaaaagtttcaccatatcagattgcgataactccccttttagcgcctgcttgttggcggacagcttcgccatgattttcttacgctctttctttcgagactcgttaatgcgttcgacttcggcgacaataggatcgatggcaagcgagttaatggcagacttaccagcggaaggcggctgcgacgtgataacgtaaagcgttgtcggttgctcgctgccgtggtactcgacccaaaagcggcccatcatcgcggcggatacggttccgagaaagtgcatgtaagcggatgattccgggaactgaacagaacgcgctgcatttagcgccagcttgccgacaacatcataatcattggcgatcgagattgttggatacttatccgcgtttacgtcgatatctttgggctttggccagaatgaaacggagtcacgatacccgttcgcacgaatcgcaacgcgcaggggactgatcccctccctttctgcgatggcgataatatcttgcggtgatacgcggtcatttaaaaacatgcccttgctcctgattggttaatcgttcggctaatcatatgccgtattaaatccgagatccagtgataatctaaacacgcttgaaaaacgcgcttggattatcggggcgcatggccccgaacccgtcacaggtatttagcttcgaaagtcgttccgtccgatacactgaagccaacttcctcgcggtacagcgtccagcggcatccatcacgatcgaagatgtatccggcaaccgcgccgagcgcacgaccgctttctacctggtagcgcttgccgacgctgaaggattttttcatcgggttgctatggtcaaggccgacgcattttagcgttttggtttttagttcgatgaacgtcgcaatcacctggccaccagcgccagcaataaacaactcgccgctaacgcctaccgacaaaataacgcgcttcttcttcagttcgacgctgtcatataccatcattgacacattgccttcatcgtcgacgcgggcgggataaaggttattttcgtgtatattaatagcgcggcttgacgtgcatttaatcttgattgacttcgccatttattttctttctccgatctcgatgtacaggtttaccaaatccagaaagtcagccttgcttttgcaacccaacttaaagccaacgtgcgactcaattttattttgcatcgcagccagtgttgcgccgccattattcatcctgagaacttcgcggcatacttcggcgagcttttgagatatcatttcttcaccacctttatttccatgccttcgcaagcgctcttgatatcattaatcagacgattaagccttaaatcagtcattacatggtgatgacgtatatcaataattccagcaacgactaacagcatgacggcaaagataaaaccaccaggcccggacatacacaaaacagttaacatcatcaagataataaatttcatttccgttttactccgttgcgtttcgatggggtgattctacccgactttcgccgggtagttttagaaattcgtgctattctcgataattcgcctggaacacggcgcgggcaaaacctcgcggagtaatggaacgcagcattttagtcctttctgaccttccacccaaaaacttccaggcccaaaagaaattcacgccttctactccatccggcggcgtgagccgtttcggttcgacaaaaccgtttccgtgccatatgcacgttttcttcgtgtaattgtcacagtggggcattttgggatgccacacaggctcgttcggagaaacatagccaccgaagtcgcgcggatggaaataaaaatccggctttcgccatagtgacgataatttcccgaccgggttttcgaccatccaggggcaaccatacttattgcctaattgctcgaccatcttcgcatcccctgctgcggataatacgtcattatcttcccttacgtgcttgattccgctatgcgctaacagcgtgcatggcgggaaagcgaaaatgaagtcaggatctggaatgccgagaatcgatcgcttaacgtcaaaatccttgtcaatccaaatgttaacatactggatatttgggtgaaccattcgaatgctatattctccgtggtcgccggagtcggcgttgaaacagtacaccttgcatcccttgatggcccacggcaggcccatgatgccggagccgtcgaacatgcagtaaataaccttttctttcatgctttccacgcctcaatgaacattctgttcgattccagcgtcagcgtgacgccagccagggaggactgaatgagacgaccgcccggaaccgtcccgatgatgtagcggcctttcgacttcgtgatcgtgatctgagtgaagccggaggcgcggttcatgcggagaacgacgcggccatgagcgttcaggacggcgagaatggaatcagtcttcggatggttcattgtgtagctccttcgtttgttggtatggggacagtatgccactatcccgctgtgttgttttagcaaaacgtgctattccggaacgcaggtcgcgtaatcctggctgatgtagatcgtgcgctgaacgcgaggttcgagatcaccgagttcctggatggtaacatcgttgcttcctacccggcacggaaccgatccgaaaataaactcgccagtctgcttgtcgttgatttgccatacattaccgccttcctttttgacaaccaggaaaggcgcactgtctgcactgaactcttccgggccacgaccgtagtaatgcgtgatcgcagctttggccgcagcgctgaaggcatcggtaacgtcattggtcgccttgtctcggatggccttgatacgttcttcaggcgatccgatgatgtaggaaaagctgttcgaaatggtaactgttcgcattatattttaacctcgttttggtggatgaagtcggcgacgtaatggcattcgatcgggttctcgatacccgccagcacctcgcaagacccgttattcagtagctggcaatgctggcactccgcaccgccaacactggcaatgacaatggcgatcccgttgcatgaaccgccgaacattcgatgagggaagtggtaagcatcgcaggtgcaaaccacctccccggcccgccgtttcctcatacctggcccttctcgatgcagaaaacccaatcacgagcgtcaaccgcaaagcgtgcaacgccgtcgagcaccacgaagacagtaaacccgttgacgccgcgacccttctcgatatcggtcacggtgcggaacagatcgcttgcgccatattgaattttatccccgacgactacatccgcaaatgctttcatggttaatctcctgactggtttcgatgggttaactataccaggcctcgcggcccggcgtttagcaattcgtgcttatttcactgctttcttcgctgccttgtacgcctctttgaaagccggaacatcttcgaccggaatccagaagccggagccatagccatcgtcatagcaagggcattggtcgcagtagtcgccccaggttttctcttctccgccgacagagaatccagtgggcattttgcataacgcttcctcaaccgcttcgatcttgtcggcgtcgctatccatgataacgaagttccacttgccgttatactcgctgcccaggttgattgattcgcgttgaagtttcatagctttagcccctttggctcaattcgtttcgttgaagtcatcatagcaaagccgatcggatggattttaacaaaaaatgctattcctgcgattgctgattattccaccgattcggaatagtggaatagatggtgattgcacctgattccctggtgattagttttgacgaatcatgattgcttttgattgtttcattttgtgcaacgattttgtgagtgtttcaggatttgcaacgaattgcataaa

SEQ ID NO: 253 - DNA, 47386 bp, synthetic construct
  source 1..47386: mol_type = other DNA
aatgtatgcaccatgcacgcaatttgccgatcgaagctggcaaaacgtcgagttgtgtttcgccaacatttacgtcgtgtgggagtgtgggggcggaatcatcttacctaaaaattgcgcaaaaaatgaccaatataagcccatatatagatagtaagtatatgataaataataatattattattattactctttatctttatatatgtttggtaagatttctccggggaggttatggattcctcttgcgcaagccataatttttagatgttccgccgcgaaaaaatgtatatagggatatataggggatgacagcaaatcttaccaaacacgccgaaaccctttgacggcaaggcctgcggcctgtattatcaccttccgaaacattaccaaacgccgtaaatgtgggggaaacacaaatgcaatacaaaggctatgagttcgaagaagtcgacgtgtccgagtggatgcggtacgacgcagaaaagcaagccgcttaccatgaatggctgcaatccataacgtttggcgacgccaccaggccagccggacggagccaggaagcagcgaagccggaaggcacattcactggtaatcgttcgtccgagatccggcgcatgttcctggatggcgggcggcgtatccagatgacggcggaggagttcgtggagaagttcggcgttaatccggtcgacaaccatttccgcaggccgttgctgaaactcctggagccgggcgaggtgttgcgggtgagcctgggggcggggttaatctccgtctttaccgagttcgacgcaatgactggctcacacctggaagccgaggcatacaggcggcagggcgctatctctgagcgggaaagaatacttgccatcattgacgaagtgatgccaggaggcatcatgctaaaaggctataagctggcactaatcgcaaaaatcacaggagcacgataatgaaactatatccagaccaaaacgacccggcggcaccgatgcacctgggcgacacgccaatcgacgagcaggaggttatcgcagccattgccagggcatcggacgacgaaaatccaaccgccatggaatgcgtgacagccgacctgctgttaatgtcatttcttccgggatctgaatcttacattcagcacatcaccgagacgggccaggcagtgacgaagccggaattcatcggagcgtctaacgtcctggcgatgatggccgatgaggccgacaacatcattagcctggattatccacaatgagcgcctttatcctgttttccatcggtgttaattgcggattgctcctggcggcatttatcatccacctgagcaacaagtagcactttttgttaaaactgccgtaacgtcatttgataaagtggcgttactgaagtgaacaatccaatcaggagcaacgcaatgaacgataatttaatcgcactgctggaagaactgaattcctacggctgcgcatacatcgagctttcgagcgagcaggttattgaagtcgcaatcgacgatgacgccgggtttaccagattaagggtggcggcaggggccgaagaggaattcgaagactgcggcatccgtgaagtaacaaaccttctcgaataccaccaggtgaaggagatccgctaatgaacaccgtcaaacttatggttgtcaatgcggcccgcgagcgtgagcgccaccttatcggctgcgtattcgatgccgtcgaggtgcacgaaccgctaggcacagtgcacgtaatccagggcggatacctgaacgaattcatcgtcaacccgctggacaccgacgaagatttgaccatccgtgttggtagcgagccggaaaacgcgcttttccacctgcggaaagtatcgaaggcgtcgcagcgcaagttgctggttcgcgcactgaagcgcattgcgaaggagcgcggttacaccgacgcatacatccgcaagttcggcacgttcgctggcgtaggcgattgggcgcggtcatgggccgacttttatttcaacaaatccggcgaattctgttccgtgcatacggactggctgcatggcacagaacacgatcccgtaaacggccacgagtggtacgaattcattgaggcggaattagacgccctttgatagcacgaattgctaaaacgaaagtccggggatggtgcatactatccccacactaacgaacaaaggaaattacccatgaacagcatgaaaattaacctgatcccgtccgacaacttcaccaaagacgacgacccgctgttagccgccgttattcgcgccgggatcggctgggcgcttagtgatgcctcgtgcgaatcatttatgcgtgaaccgttctcacgaatcgcggagcttgaaaagcaggttgctttcctgactggtgaacttcaggcggctatcgccacgatcgagaaggttcgggaaatcatgcgcaccgaacctggctatgacgttgaagatcacgcgcgagttttgcgcatgatggccgacgctttcgcaaagctccagcaatagcacgaaccacaaacacgaatcgtggttgctacatgtcaaccccatcaaagataaggaaaaacatcatgatttacgcaattattgccctggtggttcttattatggccctgtatgcgtgcggctgcttcctcatgcgggccttcctgaaatctgcggattctaccgacaaagaagatctttatcctgtgctttgctggccctggattacactttccgccgttggcagcgtgatcatttcccgcaattttaagtggtgaggcgatacatgaacatcaaaatgtggttcaacggatttacctacaacgtgcgctttcgcgggaagttctattactggtgtgatgagggcggcaagcgctggcggattcgcccacaccagaaaggcgcgagttatgagttaggcattgccgaggcgcaggggcgcgtcgagtgggttaagctgaaagtcatggatggcctgccaaatagcacgaattgctaaaaccgatcaggggtaagctggtatagttaccccatcgaaacgaaacggagttacagcaatgaaaatcaaaataaccaaaatcaacactcttaatggcgacggctcaattaccctggaagaatgcggcctcaaaatcggcgaagttcttgaggtcgacggccacttcaacgacggctcctactgtgtgattgctccgcgcaatagcgagtttatccaggctggtgacaatatcagcgtgagcgaagatgaatgcgaggttgtggaagaatgagcaacaaaatttgggttctaacctacaccattggaaccaacgaggggcgcaaatcgcgccgcctcatctgcgacaccaaagagcgggcgattaggcagcaaaccgttcttggtggcgaggttgtcgagtatctccgcaagcctgaagcgttcaaggtgaactggccggaaggcatggatatcaacggcgctttagcgagcctgcgtgagatgcagcacaacccgaagacgtggagcgaccttcaatgcctgcgggcagagccggaagtgaaggccgacccgttcaccaatattcgggcgcagcacgcggaatggtcggatcgccagttcggtaacgttgggccagttgggccgctcaagcacctggcgaaagaggcgatcgaggccgccgaagcgccggatgacattagcgagttcgccgatatcatcatgttggtatgggacgcaacgcgccgcgccggattcagtgatgagcagttggctgaagcggtggcggaaaagctggaacggaacaagcgtcgggcgtggggcgaggtcaaagatggcgagccttgccaccacgtgaaaaattaacgaaatcgaataccgtttaaagcgcctgtaagccattctggcgggcgcaaatttaaggagtgcgattgtatgcctgaatactcaaaagtcgaagatatgccgattggcgcaacgattacgggtatccgtatgagtgagtcggtcgacacaatcgagccgctggcgttcccggttacgcaggtggagacggacagcagaaaagggttcatcttcatctacaaaaatttcaatagtccgctgcgtgttgaagtgttcattgctcgcggaacctgggtagaatgggagaaggacaaatgttcggactgaatgaagcgcagtacaacgctgtgaagcgcatagcaaagcagatggccgcagaaacaaaagacgccatcaagaaggacaagaagacctacgatcaggtcgccgcgaagatgatcgataaacattgggcgcaaatcaacacgctggttactcgcggccagtttatctggatagctggctacctggaaggccgattcggtcgcagggatggcgagtatgaataaaaaacaggcaaacgaatcagcgacctattgacgtcctcgcgctgaccgggtaacttgaaccacgtagacacaagaggcggtaaacatccgcaagtctggccccgctttggggcatttacaaaaggggttgtgatgcagtacaagatcatgctcacagcaagaaaaatgggcggcttttgcaagtcctgcattcaagagtttagcatgacgattgaggcgaacgacaccgccgacgcggtggagaaagcaaaaaagcaatccggcgttaatctggatacgcataaaatcaacataaactacataagggaagtcaatcaatgttaactctgattattgcactgttaatgctgttcataggctatcatgttggcgcggctcatcttgtcgagcgcctttctaagcgggtacatgaaggcacgtttgctgccatgatgtacaataagaaaactgcacgttgggaaaaaattggcgatccggatggtatcgcaaagcgcataacgttttcgccgcttccgtatgttgactgcgagcctttcgtgaaactacagaagacgcttaatcggcgaaacaaactgatatgatacaacgacccgcttcggcgggtttttttatgcctgcaatctggtatactcgcaactcaacaaagaaggagggctaaaaatgtctgaagaacgtagaaagcgcgtaacgaaatcgcactttgagggaaacttcaaagcgctatatgaaaaggaatttggcgtcgtgctggggcgcacggcagaaatgacgccagaacaattttttgatatcgcaaagcgttacttccagtgggccgaagagaacgcaatcaaggcggcggaaacggcaacattccagggcgacgttaacgagtggggagtgaacaagcctcgcattttcacgatcacagggttaagcctgttttgcggcgtgaaccagtcaacgcttgggcgctatcgccacgacccgaactatgcgccagttatggagtttatcgactccgtaatctatgagcaaaaattccagcttgctgccgtcggcatgattaacgcttctttcgtcggtaaagagatggggatcgataagccgccagtgctgaacatcgacgctatcgccggggataagaacgagatcaccgaagagaaattagagaaagccgtgaccaatattcttgataagctgtaagggtaggctatgaacgaaatgatcatttgggaagacctgtcgccagccgataagctggcaattaaggcactgagtacgcgaaacttttcgctattcctgaaaatctggttccagatcattcagggcgaaaagctaatgtggaactggcatcactcctacttttgccacacggttgatgaaattatcgccgggaagcgcaagagcacgatcgttaacgttgcgccaggctccacaaagacggaggtgttttcaatccacctcgcgccgtatgcgtatctcaagtgccggaaggttcgaaaccttcagatctcgcagggtgacgccctgtcaaaaggcaactcggatcgcgtgattaagatcttctcatcaagcgagtggcaggagctatggccatcaaagttcgggcgcaagcagatcgatgaatttcaggtcatggacgataacgaccgcgtaaggcttgaaatggtctcccgttcgtccggcggccaaatcgtcggtaagcgtggcgggtacatgacgccgggattcagcggccttatcgcgctggatgatatcgacaaacccgatgacatgttctcgaaggtgaagcgtgagaaaaaccacgtactactgaaaaacaccattcgatcccgtcgagcgaagaagaagaagggcgacgaaacgccaatcctttccgtgcagcagcgattgcacgcgcaggatgccacctggttcatgatgagcggagggatggccatcgacttcgatcgcattgttattccggcgatggttacgcgggaatatggcgaatcgcttcctgactggttgcgtcctgagttcgaacgcgacgtgctttccggcccgtcggtggttattgacggcgtagaatactggtcattttgggaggacaacgaatcgatcgagaaccttgttgccttgcgcgaggccgatctttatacgttcctttcgcagtatcagcaggagccaatcgccctgggtggcaacgtgttcaagtcggagtggtggcgctattacggcgattccgacaaggcgcacgagccacgcccggacaagttcgaatatacgttcatcacggcggacaccgcgcagaaggtcaaggagctaaacgactactctgtaatgtgctattggggcaagtatcgggatcgcgtctacttcattgacggaattcgcggcaagtgggaagcgccagatctccgcgttcaggccgaagcattcatcaagcagtgctggcgtcggaacaaggagtgtgggaaccttcgccggatctacatcgaagacaaggcgagcggtacaggtctaatccaggatttaacaaaggcggtaaacggcatgggcgagatcgtcccggtgcagcgcgataaagataaggtcactcgcgctatggatgcacaaccaatcatcaagggggggcgtgtcgtgctgccggacaatcacccattcgttgcagagcttgaggcggagatgagcgcgtttacatatgacgattctcatccacacgatgatatttgcgacaacgtgtttgacgccgcaaacctggaaatgaacctgagcgacgatccggtagagcgaatgaaacgccttgcgggattgaaaaagctgggtcgctaatacataatgtgggcctgacggcccacacttaaacaaggttgaaatatgaataacattaagatggacgactataatcaaatctttaatggtggcgctggttatgcgtcaaccctcgcgtctatcgcggcaagatttggaacaatgtcgcaggttgaagagttctatcatgaaaacggcatggcgaagaaaatcgttgacgtgatcccggaagagatggtggctcccggcttccagctaaacggcatttcagataacaccaagtttcaatcagaatgggacgggttaaatctggagccgcaaatcaccgatgccctttgctgggcgcggctgtatggtggctcctacgtcctggcgatggttaacgatggtcgcgcattgacttcagcagcgaagcggggtaagccgctcgaatcgatcgttgtttacgaccacgattccgtttccgtcgcagaggaggaaaccagcccgcgaagcccacgattcggaaagcctaaaatgtacgaggtgaagccgctaaacggcgggcaaccgttcaaggtgcactatacccgtatgcactacatcgacggcgagcgagtaaccaacaaggtgcgcaagctaaataatggcgctggcggttcggtgctgaacaagtcaatcattgaagctattcttgactacgactattcggaatatctggcaacgcagctactgaagcgcaagcagcagggcgtttggaaggcgaaaggcctggcgctaatctgcgacgacaaagaaggcgagtacgccgcccgtttgcgcatggcgcaggttgacgctaattcaggcgtcggcaacacgatcggcattgatgctgacgacgaagaatacaccgtgattaactctgatatttcaggcatcccggaattcttgtccgctaaaatggatcggattgtcgccctgtcaggcattcacgagatcgtgctaaaaaacaaaaacactggtggcgtaagcgcaagccagaacacggcgctacagacgttctacaaactggttgaccgcaagcgcaatgacgattacaagccgctgttagaattcctgttacagttcatcgtaacggaggaggaatacagcgtcgagttcgaaccgttgtcgctgcctaccgatgcggagaaagcggatatcttccagaagaacgccaacgcggctcgcggcctcgttaccgaccaggttattgacgccaacgaagcgcgtgatactctgtcggcgttaattcctgaactgaagctaaaaggcaacgctccgaagcagaaaaaacttccggatcgcgccgctggttcaggcagcacgcaaagcgcagagatcttaaacaacacggaggcggatgatgaaagttaacggcagaatcccaaactggcgttatcctgaagcaagcgagcgggatttatcccgctccatgcaggacgcggtgacagaactcgtggtagaaatgcgggatcgcttagaccgcctgaaatttgacgccacggcggaggagatcagccaggcagaagacgatatcagcgaatcggccatcgtgttcttttccgccgtaattgcggcgctttcctccattgggttgactatctatagattcaattctaaacagtggcttgcaattgcgattgcggctggcgggcggaacaacgaatcagttatgcgccttaaagaattcggcgctggcgggtatgaagactggtatcaagattcgttgaggaagtgggaagataccgccgaagcgtcgatcaggaagttagcaagcgatatcgttgctgactggacgacgaaagttagaaccgccaacaacattggcaagtctcgccagcagatcgatgaaatcatcgaagggcgctacgcgatttatggtagctggtcgcgcaaccgggcaagcggaatcatcggaacttttaacagtatgttgatgatgcagcgcctaaaagatgctaaagtgtcgcattacttttggttcggcatgatggatgaccgcgagcgcgaaagccatatcaagctagaaggtaagcgacgccctgttaatggtgatggcattttccccggcgaggagtacggttgccgttgctgggcggttccgtcatttgataatgaggatgattgatggttaactttaatgattactttaatcacgtaggaaaggatctgatatggaagcgagcaacatcaaaccgagtaaaagttggtgatgttgccgggtggaaagatgagcatgggtatgtatacattagattcatgggcaaactgcgacaagctcaccggatcatttgggaaatgcaccacggcacaatacccgaaggaatggaaatcgatcatattaaccatgtaacggacgataacaggatcgagaatttaaggcttgtaaccagaaaggaaaactgtaaaaacgtatcaatgagcgtaacaaacaagagtggagttgtcggcgtgagttggtgcaagagaacaggtaaatggtttgcatccataagggttgataaaaaagagcgattcttaggtagatacgaagacaaaaacgaagccatttcagcaagagaggcggcagaggtaaaatacaatttccataaaaatcacggagataaaaaatgaaaagagttcaaaggttcgacacggtaaagatgaaggcccgatttgatgagaatggctttctggttgacactccgattgtggcgcgtatcggtgcgcaaacgtaccagacgccaaccgggccgcgagtcgagttccgcccgcgttctgaggtgtttgatgctgaatcgctggcttcataccagggaaagccgatcactttgggtcacaagatggttaacgcgcagaatgcgaaaggcctggttgttggctcgtgttccggcgctggcaaagaagaagggatcggggttctcgttccggtaatgatttacgacggcgaggcaatcgagcaagcgaagaagcgcgttgccgctgaattgtcggttggttacacttcggcagatatcgatcgtaagggttggggaaacaacgccactggcgaatatcacttcgatgatgaactaccggaaaacttcgaagagatgaaaaatgattccgtctctgattgggttcgctttgatgcggtgcaaacgaagattcgcgtgaatcacgtcgcgcttgttttccgtgggcgagcagggattgcgaaattaaatcttgatagcgaacaagaattcccctatgatgacgactcaaaccacaaaggagctaaaacaatgatcattaaaattgacggcgtagatgttgaagtggccgataacgtaggcgcttacattgccaaactagacgcgcaagttgcatcggcaaccagtcaggtaacgagcatcaccgcagagcgcgacgcacttcaaaccaaagttgatggcattgaagatgaagttgccgcccgcgttgctaaaatcaaagccgacgaagacgcaaaacagaaagttatcgcagttgtttctgccgctggcgtcaagtgtgacggcctggatgttaaggcaatgaaagttgcttacatcaaagaggtagacggtcgtgatctgtctgacaaagaagattcgtacatcgacgcttcttttgactttatcgccaactctgataagatggctggcaatcgctccaaagtcttcggcaaaaaagaagatggcgagcaaaaagacaaaggcggcttaccgaaacttgacggcaccgaaatcatcgatccgcaggcaaaattccgccgctaataatttgcggccttcgggccgctaccagaccaaataaacaggagattcaaaatggcacagattccagcttcttattcccgcaagcgtgatattgctgtagcggggcagatcgctgatacgtcactttacaatatcgacggaacttgtgttgctgaaggcgatatcaaagctggcgtactggtggcttccactggcgcagtttccaatggccacaaggtagttaaaccagcaaccgcagcgagcgacgtcattgtaggcatctcgcagttctcgcaagcctactcgcctgaaggcaagtatgacgatgagagcgcagttaacgttatgactcatggccgcatttgggcgatcgctgacgcaactgttactgaagaagattgcgcgttcggttctttcgtcacctttaccgcaaacggcacagtagcgaagggtgatgccggggttatcaaaactggctacaaacacactggcgaatacaccaaaaacgcagatggcactgttctggtgaaagtgcaggtgctttagggcgctgtagctccagcggctacaactggcgacgctggcgtataaaataaggggcttcggccccatttttgcaccagaaaaaaacctttgacggcttaacgattcgtgatattcttcatctcgttaagctaaatacacaaacaggagttttcagatgactatgaaattagatgcattcgaacagagtgccattaaggtcgcaatgcagggcatgggcattgatgccgcaaaactggatgcttacggtatctggactgttaagcagatgactcaattactgaatcgccagtatgagcaggcatacccgcagaccagcgcacttgagcttttcccggtaactaccgagatctcgccgaccgcccgccgctttgagtggctcgaattcgatggcgtaacttctgcgaaaattatcgccgattacaccgacgacctgccgaccgttgaagcgatggcgaaagagaagtcagggaaagttttccgcctgggtaacgcgtggtttatttccatcgacgaaattaaaactggcgcggcgctgggttccagcctgagcgatcgcaaggcaactctggcccgcgaaggtcatgagacgctcgttaatgatctggtgttcaaaggatccgctcctcacggcatcgttagcgttttcgaccatccgaacattaaccgcatgaccgccagcgcggcttggggcgatgacgcagcagcggctgaaaaggcattcgaagatctggaagacctgctaaacatgatcgaagaaactacgctgggccgccatcacgcgaccaacatcgtgattcctccgtctaagcgtcgtcttctgacgaaaaagatgcctgacactagcggcgactcttatctgacctggttcaccaagaaccacccgaacatcaccattacggcgatggcggagctggaagatattgacggcgcaggcaccaaaggcgtgctggcatacgaaaaagacccaatgaacatgagcatcgagatccctgagcggttcaacatgctgccgatgcagccgaaagacctgcatttcaaagttccgtgcacctccaaatgcactggtctcatcgtgtaccgcccgctgactattgcgattctcaccgggatttaatcaaaagcgccttcgggcgcttttttattgcattgcattctgcaatgtgctttaatttgaaacctaaagtaaaccaatggagcattaacaatggccagtaaaaaagaaaccgtagaaaccgtagaaaccgtcgaaaccgtagaaaccaccagtgccgaacaggcgtcgcaggttgttcaactacaaaacgttggtgcatgtgcaattcgctataaaggcaaaaattacgtctatgagcaggtttttgaagtgccggaaaacgaaatcgaccgattccgccacgaaatcttcaaaggccgggtcgaattctacgacaatccgaaacgcacgcgcgaatacatcgcagcggtgaaggcgaaagcgaaagagatcgtgcagcctaaaagcgcggaataacaaaaactaacaaagggcgcttcggcgtcctttttcatatcaggagagcgaccatgaattacacaattcaagatgtgatcgataaaatgcgcagccttgcacctccgcttaaagaagttccagatgaactgctgtctgcgtgggttgtgcttgccgaagagttcgtttgcaaatccaggttcggggattccatcgttacggcgatcgcattgatgaccatgcacctaatgtttttggatggagcgatgaagcaggaaggcgaaagcctggaatcttacacgcagcgagtggcatcgttcaccctgaccggggagttttcccaaaccttcgatcgcgtatcggcgtcaagcgacaacgaaatgctttctacgccgtggggcaaaatgtactggcgtatgctcaaaatgcgaggcggtggcttcggcctccttaccgccgggaacgtgcgccgctgcggaattggtaggtgatcgctatgaactacaaacaaatccaggcacgcgcaagcgcgggcattaagtttttcagtgacgctgacggcgtattcaacaagtacacgaaaggcgctggcggcggaatcgatccggaaaccggggaagatatcattcctggcgaggtggtaacgacaatcaagggcgcgatcagggatgtaaattaccgtgacattaacggcgaaaccatcctcgctggcgataagcgcgggtttttcactcatgatgtgccaatcatggagggtgacgaaatcgaagtagacggcgagcgctaccgcgtggttaatgcccgtccggtaaaaccaacgggaaccgttgttgcttaccgtccagttttgcgcagggtggcgacttatggctaattacacgatccgggagttcacaggggcaattgatgcatggtgtaaggccgctggtgatgcgctggaggacgttgtaaggtttacgtgtgaagatattcaccgcgacctcgtaatgcgttctccggtggatacagggcgcttccgtggtaactggcaaatcacctttaaccgcgccccgctttacgcgattaacgcatatgaccaaactggcgaaaagacaatccagaacggcaaagccaacattgcactatacgcaaaaggggctgggatcacttcgatctggttcagtaacatgctaatctatgcgaacgcgctggaatacggccattcaaagcaggctcccaatggtgttatgggagttgttgcgatccggttgggcgtttatgttactgaggcaatcaagcgagcgagggcgaaaaatgcattatgagatggcgttaaaatgcaaggcggcagtggctaaatttgccgccgagaacgggttaatggtcgcaggagataacgttgactttaagccaccaaaacacggtgaaacttatctcaagttctcctacgtagaagcggattccagatctgtcagcctttccagaacttgccgcgtttatctggctatggtgcagattgacgttgttttcaaacccgggatcggaaccgacgccgcgcggctaatcgcgcaaaacgttgcaaaatccttccccgaaggcaaggttgttgattctgaaagtaagttatatgtgagcgagtgggcggaagtgtaccgcgttcagaaacacgaaacaggctggctcctacccgttcgcttcacagtaagatgcgaaagcgcggaggagagcggttatccatcaacatgactggtcttagaggtgcttataatttcttgccagcctgtaaatatataggcataatggcgttgttaaactttcatcaaaacaggagtattcaacatgcatttaccaaacggtgcaaaggtcttctttgagaaggctcgcggtgcggccattccgtttaccgcaatgaccaacgacgcgaaaaacccaaaaatcacagtggcggacggcaagctgaaggtgaaagatattgtgatcttcaccgattgcacctggggcgacttcgttaacaaggtggctcgcgtaaaagcagtgacagcaggtgtggcaacgctggaagagttcgatacctccgacactaacaagtatccgggcggcgcggccactggtaacgtgagcgtgatcactgattgggtcgaattgccttgcattcaggatttaggcaaagacggcaacgaacagcagttctataactatcagtgccttggcgatgagcgcgagcaatcagaacctacttacaagtcggcggtgacgcttaactacacgtttgcgcacgattacagtaacgcgatctaccctgtgttgcgttcagccgacgccagcaagcaggcgagagcgatgtacatgtatatcccgcgagcttccgaggttcgttactggtctggaattgcatctttcgatgacattccttccacggctgttaacgagatggaaacggtaacgcttaacattgcgcttaaaggtgctcacgtcttccttccggttgtcgtgtaattaaatggcggggcttgtgcctcgcctttttttgtgcataatagcgaataacacaaaccaatcaggagttaacaaaatggctaaattcaaaattcaaattggcggcaacctcccttctttcaaactgcccgtaaccttcacttgcccggatggcaaagaagcgaccatcaccatgaccgtaaaacatcgctccaccgatgagatgaaagacttttatgagagcgaagataaagcgccaaagggtaacgccgagtttatccgctttatggccgaaggctgggatcttgatgatgagttcaacgacgaaaacatttcctggctttgcgctcacttcccggcgttcgtcatggcactgccacaaacttacatggccgcgcttgcgggccaccgtgcaaaagtttaaggcgggctgtttatctcacgcttcagcctgagctaaccgatcgccagcttgccgagtacgggttaaggcgatcggattatgaggcagatcttgaaacgatctactttgatgaacagaccgcccaaagctggcagctattccaggccatgcaaacgcagtggcgcattgggatgaacggcccaacggggcttgactataatacattgcctatgttcttcgaattgtataaaatcgacaatcgagaagcggcattacttgacttgcaaatccttgagggtgaatatctgaaggagatttacaagaaatcaaaataagcgcctacgggcgcttttttcatatgggggctaaacatggctgataaagtagctgggttgacgtttggcgttgacgtttcgcaggttgataaagcggtacgatcactagcagaactgaaaaaccaaagccagcaaacaggcgctggcctacagtcacttgcggacgctgaaaggcgggccacggcgcagaccgaggaaatgaaccgcgcgttgcagcgccagaagcaagagactgacaaatcaaaaaccagctttagcaggatcgcaagcgccatcgatccaacgatcgcaaaaatggccaacttgcgcaaagcgacggaagaacttgataaagcgtgggcgctgggtcttgttccggacaaggaatttttccgccttggcgctatcatcgagtctaccaccaaccaactccggcggcagcaggcggcgctaaccgaagaaggtcgcgcagcaatcgcagaggcggaggcaaagcagaaggcggcaaacgccgggcgtgattttgtcgccagtctgaaacagcaggctgactccatcgggaaaacacgcgccgaactgctggaaatgaaggcggcgcaattgggtgtatctgcggaagcggccccgttcattaatgccctgaagcagcaagagcaggcgttaaagaaacagcagaatgcgatgggcctggctggcatttctgccgggcaatataaaatggccatgcgccagttaccgatgcagatcacggatattgtaacttcccttgcgtcaggtatgccaatctggctggttgcggtgcagcagggcgggcaaatcaaggacagcttcggcggcttgagcaatacgtttaaggtattgttgagctacattaacccgctaacggttggtgctgcgtcgttgggtatcgccctggcggcaatcgctaaagctggttatgactcctggaaagcgcaacgagaactggcgaatgcgctggtgctgactggtggctatgctgcgaccaccaccgggcagatcacagccttaaccgaagagattaacaaaaactcatcggctacgattggcagcattcaggaaatcgcaacatcgctcgccagttctggtaagtacacaatcaaccagattaagcagatcacgaagactacggcggaatggtcggcgcagacgggtgagagcgagaagacgatcacagggtattttgattcgatcgcaaaagaccctgttaaggggcttgccgatctcaatgagcagtttaatttcctgaaagagggccagctaacctacatcgaatctttgcgtaaaaccaaaggcgagacggcagcagcagaggcggctacaaaactgtttgctgatactatggataagcgccttaaagatatcgcggacagcgcaacgccactcgaaacgatgtggacggatatcaaaaaatgggccgctgactcatggaaatgggtaggcgatcacacggtaggggcgctaaaccttatcgttgatacggtttccgcgatcattaacacgatcaggaagctgattgccgacggcgacgccatgatcgcgcagttcatcgttgacgctggccggaagctgcaaaaaattccaggaatgggcgactttggcaatgaatttctggcgcagcaggagcagctaatcaaggactcgaaagcgaaatccgacacgcttgcaaaaaccattgcggaacagcaggcaaggatcgcaaaaggcgaaatgggttacattgatgccgcgaaggataaaaccctttccggtgggtacagcagcaaaacgaaggatcgcgtaaatcaggaagaaaaagatatcctgaaaaaccgcaacgccaggaagcagcaggtagacgcgggcgttaaaattgatgagcagtatcaggctgaactgctatcgctacaggcgcagctaaaggttttgcagcagcacaaagggcttgacgacaagatcagccagcagcgcaaagactacttcgagacggttgctaaattccaggttttggaagaggcaagccagaagcgaaaactgacccaaagcgaacagcagatgctggcgaacaaaaagaatatcctgtacatggcggaacaaaaggccattgtgggagatcagattgttcagcagcagcgactgaacgccttgcttgacaagtctaccaagtatcaaaaccagatggcggagaagaccaaggcgctacaggataccgccggaatgggtagcaaggagcaggagagataccgggccaatgcgcagatggcggctgactggaaaaacaacggcggatctttaagtgaccctggatttaaagcgatgcaggccgcaagcgataaattctacgcacagcaagatgcgcaaatgatgaactggaaggccgggtttactaacgcgtgggctgacattggcgaagaagttaatgacgtatacaccaatatcggggatatcactaaaaacgcatttaacggcatggcgagcgtgctgactgattttgtcatgactggtaaggccagctttagcgacttcgcaaagagcgtgatcactgacattaccaacatgcttatcaagatggcgctgtttaactcgctttctgccgcgtttggtggtggtggaacgttcagcttcgccagcatgttcagcaaaggcttttctggcggcggttacactggcgacggcgggaagtatgagccaaaaggcgttgttcacggcggggaattcgtattcaccaaagaggcgacgcaaaggttaggcccggaaaacctgtaccgactaatgcgcggctatgcaagtggcggcctggttggtggtaacgcaagttccggatctggaatcaccaacggcggcaacgtcgcggcgtcggcggctatggtgtttaccattggtgatattaacatcacgatgggttccggtcaggatagcaaggggctagagcagggcgtaaggcagatcgtgaacgatatgttcaccgaggctttgagccaaaacgggcgcattgcgaagttcgtcaatgagaaaacgaggaggtagtagtggattcctttaaatggtgtacacaaatccaaggaggggcggcgaaagtcgccgtatccaataacgttcgggcgatcagcttcggaaatggctacatccaaactgcgtcgagcggcattaacacaaagcgccggactgttccgatcgtttatggcggttcggattgggaagcggtttataacttctgtcaggatcacgtaacaaagccttttgtgtggaaggcaccggatggaagaatgggcgtgttcgtcgtaactgccgactccgttaaccttgcgccgcagggtggcggggtgtttgaggtaacggctgaattcgccgaacgcttcacttcagccggataatcaaaaagcgccctttacgggtgcttttttttggcctatgatctggagtcaattagaggagggcttacgatgacagccaatgtttcaaaagattttgcgaactgcctacaaaaacttttccccggcgagatcctaacgctgatcgatatcgacgccacaaagttcggcgggcaggtctaccgattccataacgagaacgtcgcctatacaaccgaggagcttttggccgcggttaacggcgggacgcttcagccaaagatgatcacgtttcgcggcgagcagtacggcccgcgaccgttcggcctgggcgggatcgcaatgtcgagcgatggcacagtggaaaagccaacgctgacggttagcaatattgatgcgcaagcgagtgctcttattcgagcctataacggccttatgcaagccaaagttacggtatgggttttggtcaaggaattgctacaaaacgacggcagcgttaaagagggcgattttaggcgatttatttactacatcgagcgcccaaaacaggtcgacccgcaaaaggcaacgttcgaattaacatccgtgtttgatatggatggattaatgatcccggcccgtctgacgcaaaccgtttgctattgggcgcagcgtgggtggtacaagtctggcaaaggctgcgactacaacgggcagaacggatacttcgacaagttgggaaacagggttgaagacccgtcgcaagatgtttgtggcggcttggtttcttcttgcaggcttcgttttggcaatgaaccgttgagttttggcggttgtgcgacagcaacattgaaaagtggaaggtaatatgttaactccgaaaatcaaaatgcagatcatgcagcacgcgaaagaagtttacccgcatgagtgcgcaggtctggtgacgcaaaaatcacgagtgcaaaaatatcaccgactcgacaacgtttcgccagatcctgagaaagaatcaatgcctgatgaaacgcagtatgcgctggcatcaatggagggcgagccgatcgccttcgttcactcccacactggcgatggggcaaccacaattccgagcgccactgatttatgcttttgcgatgagtctggcttgtcgtgggttatcgtctccatcccggaaggtgatatgcgaatcattgagccgaaacgccgacctctgattggtcgcccctgggctttgggcgcttacgattgctatggcctaatcatggattttcacaagcgccacggcgtcacactaaaagatcggcgattgccgttcgaatggtggaagccggaatacaaagagaatctttaccaggattactggcaagaggacggattcattgaaaacactggcgagcctgaagttggcgatatgatcatcttccagattcaggcggaaaagtggaatcacgctggtatttacgttggaaacaataacatccttcatcacgcgtttggcaagctgtctcgcagggatatctattctggatggtacgagcagcacaaggttttaatttgcaggcacaaggagcttaaacatggcatcacatacaaagacgattaaactatccggttccctggggcgtcggttcggtgtcttccacaaacttgcggttgattcagtcgctgaatgcatccgggcgctgtcttaccaggttgaggggtttaagcctttcatgcagagcaaggttggtttaaatatgcgcttcggcgttgtcgccgacggaaaaccaatcagcgcgaacgaccttgcgacttttgccgtggcgagggagatcagaatcattccgatcccaaaagccagaaagaacggcgggttgttgcaggtcgttatcggagcggcgattatggttgcggccttctttactggcggcggctcgctggcggctatgggcgctttttcatcggctgcattcatggctggcggctcaatggttttgggtggcgtaatgcagatgatcgcaccgcagatgggcggcaatatgcgggcgagcgaatcgcctgagaataagccatcgtatgcgttcggcgggccgattaacaccacggcggcaggttatccaatccagttgccatacggttacagattggctggcggcgcattgttcggttctggatcttacgcagaagacaacaactaattaagccattcgctttttagcctgggggcgtagcctccgggctttttgtcgtgtacaattgcgagactattaacaggaggctaaacgatgactaatatcaaggcccgtaagggaggctcaagcaagccgcgtaccccggtagaaatgccagataacctgatctcaaaagacaagatcaagttattgctggctgtttctgatggcgaggtcgttaacgacttcagtttgaagcagttgcatttcggcggcgtcccggttcaaaacgaagatggaagttacaactatgaaggcgtgattgctgagtttcgccccggcacgcaaacacaggactacatccagggcttcagcgaatcaagtgctgagttccaggttgctcgtgaagtcactcacaacacgccttatacgcttaccgtatcgaacaaaaatctgtctgctattcgctttcgcctgttatggccgcgcgtgctgactcaaaaagataacggcgatatggtcggatcggttgttgagtacaagatcgagatggcggtagatggcgcaagttatcagacctacctaactggcaaaattgacggaaagaacacgactggcggttacgatcggagcattcgcgttaacctgccgcaaaacttcacgtcgcaggttcttatccgcgtgagccgagtaacgccggatgctgacggggtgaaggttgtcgatgccttccaggttcaatcctacgctgaggtcattgatgcaaaattccgctacccgttaacggccatgctttacgttgagttcgatagcgacctgttccagaaccagatcccaaccatctcactcaaaaagaaatggaaaattattcaggttccgagtaattacgatccgattaatcgcacatactccgggacgtgggacggtgtttttaagtgggcgtggagcaataacccggcatgggtgctttatgacctgatcatgaatcagcgctatggtttagaccagcgtgagttaggaatcccggttgataagtggtcgctgtatgaggtggcgcaatactgtgatgaacttgttcctgataatcgcggcgggatggaaccgcgctatttgatggatgtaattgttcaatcgcaggttgaggcgttccagttggtaagggatatttgttccgcgttccgtggaatgacgttctacaacggggaaagcctttcgattatcgtcgataagccgcgcgatccggtgtacctgtttacggctgataacgtcgttgatggcgttttcgttcggacgttcccaagcgaaaagacgatgtacacgtcgtgcaacgtcatgttcgacgacgaagaaaaccagtacgaacaggatgttgaaccagtattcaaccctgacgcagccatgcggttcggccacaacccgaccagcattacagcgatcggatgtaccagaaggacagaggcgaaccgccgtggtcgctggattctgcaaacgaacctaagcgccacaaccgtttcgttttctactggcctggaaggtatgattccttcttgcggcgatgtgatttacgttgcagatccgcattggcaatcggcctttaacctggtgctatcaggccgcgttatggaagtgtctggcgtgcaggtgttccttgcctaccgctgcgacgcgaaggctggcgacactctgatcctgaatacagacgacggcaagccagtgcgccgcacaatcgccagcgtttcggcggacggtaagaccatcacgctaaatgttgggtataactttgacgttgcgcctgacagcgtattcctgatcgagagcgatcagcttgcagcggaacagtatgtagtaacccggattgaaaagggtagtgatgacgacgaatttactttcgccatcacggctacgcagtacgatccgaacaagtatgacgcgatcgataacggggtaattaccgatggccgaccaacttcggttgtcgaccctgattcaatgggcgcaccgaaagacttaacgattagctctttctcccgcattgttcaggggatgagcgtcgagacgatggttatcggatggtctgccgtgcagtatgcaaaactgtacgaggtgcaatggcgcaaggacggtggtaactggaacaacgttccgcgcactgcgacaacgcaggttgatatcgaaggcatctatgctggcgagtatcaggcccgcgtgaggtgcattagcggtgggaatgtagcgtctccgtggtctgaattggcaaccgccacactgaccgggaaagtcggagcgccaaaaggcccgattaacctgtttgcgtcggacaatgagatcttcggcattcgagttaagtgggctatgccggaaggagcggaagacacggcatacattgagctttaccagtcgcaaagcggaaccgatcaggacgcaagcctgcttactctgattccttacccggcggctgaatactggcactcaattttgcccgctggctacgtgaacttctacaaagccagaagcgtagaccggatcggcaatgtttcagaatggactgattacgctcgcggcatgtcgtcgactgacgttaacatcatcacagatgcgatcctggatgaaatcctggatagcgacgcgatgaaggaactacaggaaaacgcacaggatagcgcggcaaaactcaatgactacgcgaacagcatcattcaaaatgcgctggcgaatgatgcggacgttaggaaaatgacgaaggagaacggtaagcgtaaggcagagatcgcgcataccacggtgctgattgccaacgaatcagaagcgagggcggctgaaattacgcaacttaaagcgcagattgatgaagatatcacgtcgcagattacgatccttaacgaagccctggcgacggaaagcgagacgagagcaacgcagattggtcagttgcaggcagattttgcggctgatattgacggcgtaaaaacaacaatgaacgctggttttacgcaggttaatcaggctattgcaaatgaaagtgacgcgcgtgcaagttccgaggcggcactagatgccaaaatcgggcagaactccgcagcgctaaaccagaaactcgactcgtgggcgaacgttaatggcgtcggttccatgtacacgatgaagttgggcttgaggtacaacggtcaggagtatagctccgggatggccctacagcttacctcaagtggtggaagcgttgtttcgcaggtgctgttcattgctgatagatttgctatcatccgtaatgcggcgtctggcgcgtacacgctaccgtttgttgtgcagaatgaccaagtgttcatgaataacgcgcttattcaggacggttcgattaccaacgcgaagatcggtaacgtcattcagtccaacaactttcaggagaatgttgcaggatggaggcttgataaaaacggcgtatttgtcaactatggctcaacttctggcgaaggttccatcaagcaaacgaaccagaacatcactgttcgagatggtagcgggcgcgttcgttgccagttgggtaggatcactggatcatggtaaaattaatgccgggagaaatcccggcttaaccaaaggaggcagacaatggcttatggttttcaatcatgggatgcgaacgggaaccccaacaactatgggatcgtccctgtttcagttgctggatatattgcattagcgcaaggccagaaaagcggaacgtggtattacaacgtcccgcctgggttgaggcttggtttcttttgggtcgcaaatcaagaccagtacggcacatcgaagaggcgaattaccgttagtggtaatcagatcgttgtttcagatgcgccagatgatgcgctggaatcaggcgtctacccggcgacgcaaggttttattgtcgttcaaattatgagttgatgattatggcagattacggaattttacttaccaatgatagcggcaatgtttgggtttcgcctcaaagcatcccactggcactactatcaaagcagagcatcactcttaggggtggtactaactccgatgaagtaagatcggtaacttacgacacgaatcacccatgcgttccgttcgtggtctttcatggatcttcgccacaaggtgcattcacaaaaatcaagtacagcggaaacacttgcagcgttgttttttcttttggtaagcaaaacgtatatgcggaggtttattttttctccgtgttcccacagccaaatcctggttatgggcttgcaatttgggatgaaaacggcacgctgattttgaccaatgaaaccagaacactttcagacgtacagacctacggcactggttttaatctaaacgtcactaacggcgggaagtgggcggttagtcctgttcagttaggcgcgatcgttggtgttgttcgcgatccctacccaagaccatttcagggcgactattgcgcagcggcattctttaacggctcaagcacgcaacttaccgcatatctaacgcaggcaccaggaggagccgccagcgatctaacctacgtcaatatgaaaaacacctgcatcgctattgattgcgcaagatacgactaaaagaaaggggccatacggcccctttttctaccccttgagatttttgatctcctcttttaattcatcaacttgagcagacagagctttgattgcgcaaattgcatccatcaaaagagcattattgtcaagcacaagtttcttattttcaactacgttaccctcatcatcctgataggatgcgctgctttctttaacgtagcacgaatcgatatctcgcacctgctgtgcaataactcccctacgctcgcgtttcttaacatcatccttataggtgaacttgaccagattcattgctttgatgttttcgagtgactgcaaaccatcataagcaacaacattgtctttgtagttaatgtcagatagaccagcaaaaacaacgttgccataagcagtgcttgcaatattaccatctgatttaaactgccaatactgcgtattaccgccagttccccatttgctgacctcaataacggcacgatgttcataacccctatgttcctcaagccacatagcgcaacgcgcaccgttaccattaatgttgaaccgtgagataaatgatggagatttaaggatatcaccattattcccatttggatcgctagttggccacgctacaaaagcatcattaacggtactcctcacagtcccatatgacacaacacttccgcgaagatcggcagccccgccaactcgcaacgtgctcgacattgtaacagcgccgcgaagatcggcagccccgtcagcacgcaacgtgcttgacattgtaacagcattgctaaagtttgcattcaacccggtaacagcaaagttcgatgcatcaaaaacaacctgcttcgcgctgttcatatctccattagggcggaagtacattccttgaccattttcagggattgagtacacgatcgcattgctgttatttgccctaatagtgcaaccgttcagggtcagcgtggcgtttcctccaggaacgctaattgcctgcggctggctgaacgtgttagctacgttggtgcgcgggatcgtattatcattagccatcaaatagtcagacggtgaattatatacaattccagaaggctccgtgtcaatccaggtataaccagtgcgatcaatgattggccccgtaatcgaccctttgttagcctgtacgtttacatgattcaaccacagttcaggaacccatccgccgggagcatgaatataaacatcaaacgaggagtctgtgtttttcaccaccccaagattaatgcgtctggtgtcgtttggtctggcagcaatcagggtgcgctgagtaaaccaagtgtcaatattattactggttagcgtatcgggaagaccgcggccagaaatcgaaaagatatcaaccgggagatttgcagtgccataaccagtacctccgccaatgatgaactgagcaaatgcgtagccatcaccagcgttcttgacgttggcgatcttcatccacttctccccagcgaaagtgccagtaattttatccggcacctggacgccagccacaaggtcgacaacctgatcacgaagattttgcgtctgccccttcgcagtttgcgcgtcgttcttcgccgagttggccgcagtttctgacgcttttgcattggtctccgaggttttggctgcggtttctgatgcctttgcattggtctccgagtttttggccgcagtttctgacgctttggcgttggtctctgaggtcttcgctgcggtttctgatgcctttgcgttagtctccgacgtcttcgcagcattcttggatgcagcagcattggtctctgaagtctttgcagcggtttctgatgcctttgcattggtctccgaggttttggccttattctccgaagatttagcgttcgtctctgaggtcttcgctgcggtttctgacgctttggcgttggtctctgaagtttttgcagcgctttcagacgcagccgcagccgtagcgcttgcgcccgcagcttcggaatctgccctcacctgatcggcaagactttgcagagcttcgaaatcgaagttcttaaagaagtcgacagcatccgcaatttgagtttcctgtgactggtagtagcgcagagtttccgcaacatcttgcgccagtccgtcaacggtcagcgagtcacttaacaggatcgcgtaatcgctagacgctacgacagcgccttttgtggtgatggctttaatttcagtatcgctaaccaccttgtttacgacggccatttgaattggtgacgacaaaaacataatcgtcgcaccagggcgaatcagcgaaagcgatgattgccattttgtgccagtcccggtaacggttccgtctgcggccatagccgctttgccttctctgtatagtgccatgtttttaagcctcattggttgattgagtaacgcagataatagcatcaatgaaccgataaaaaaaggagcctttcggctcctttagttgtcaaattagaacgggatatcatcatcgaaatccatccccgcattcccgccgctgttttgcggcttaggcgcttgttgcggcttgggttgttgaggctggccccacccggattgctgattgccgccgccgctttgcgaaggatcgcgctggctgaattcgagttgcggcataatcatttcgttgtggctgtaaattgtgccgttgtgctcgcggttaacgatctgaagcgtccggcaggttacgctgatcaccttatccatttgcagcgcttcgtcgtaccacttaatcatgttttcttttgcaaagaaaactgcgcggtagttcgtgtaaattgtttcgtcctcgccatcacgattgcggatcttcatccgctccgacaggtctacggcgtacattttccacggcccgttattgttgctgccctctttgacataaggcgcttttcggattacccctgttacaacatgcattgtcattcctatggggcggcttcccgcccgttaaattagttgaaagatgaaatatcttgcgcttctggttcaggttttgattctaccttttccggctcgcgcttcgcaacctcttgcggtttaccggggttaaatccgtttgccggggtgactttcagttctgcctggcgtttggtgatatcgtcttccgtcattttccactccgccggggttaacgtttgtttcgccagcttatagatctcacgaagcgattcgagatcttcgcacgcgtcaatgcgttttttgaagtctttcggtgtcattttcgtaatttctgcatcatcatccgcctgcttgatacctagcgctgcggccagcgcataacggcgggcgtaagatgttgttgagccgtatgcttgttcgacggttttactgatcggcatattgtactgaaacgccatgaactcgccgctttcatgcaaaaacatagtttcgaggtgcatcaccttttcggtgctcgtatccatcatggattgaatgaccataattttgttcttctccagcgccggggaaatagcgtcgaggatatccccaagattcgcataggtgttcccaagatggttgttcttaccgcttttctttgcggccacgaagccagattttgccttgattaatgcggctgcgatggtggtaaatttttcagatgtacgcatgataaagtttccttttcctaattggtaatgcgcactatatcacaagtgcgcaccagtgtttagctatttgtgccgtatacgtccgggaacatgtatttcacaaactgaggagtcggcaaaacaacttccgccgcgtttgactcatatgatggccatgaatcgtgcttcacgcattcagcatactgatgaatcacgctttgatactgtttgcgaccgatctcgatctgctggctggtcagggtgaacgccagcggagcaaacggtgattttttctcctgcgttagcagtctgacaactaccgggcgtttttcgttgtaagtcttcacgaacagatcgcgctgcaatgccatcttgagatagtagcccaagttgaaggcgagtcgcccgaaatcgtcaggcttggaagattgcgtggttttgtagtcggtaatcaccacgacctcgaaaacctcatccgggttgaacccccactccttgatgagttcgggatcggaaacaacgtcaacatgatcgagtcgaaccttaaccttgacgccgaagatctcaccgaagattgacaattcacgctgtgctgtaggcgattcgatacatgcggcgtgtcgcgggttagccagcatcacgctgcgcatttgaacaacggcatcgaaatcaacatccttaaccagcttgcgcccggagtttatcgcggcgctttcgtcgcacagttcaatagcccaccaaacatttacgtcaatcccggcgcgatatgccatttccagaagttccgggtaatccttgttggacgtcccaatcaggccacacgctttcagcttcgcagacagtgccgacttcgacgtaatcagatctttaacctcgcccggagaagtcgcccgcaggtactcgccattaaactttgccgtctcaagcatacaggtatgcgaacaggttccgaacgccagcgcggctgcttcctcacgcactttgaatttccagtgcgccggggatgttgcgtaaatctcgccgaggcttgagccgctaacgtattccgcgcaccaggagttaggatcgtggtaatcatcgttggataattccgcgttggtgtatgccttaaaaattgcttcagccattggtatcactccatttgtggtttcgttgcgttaagtatacgcatgacgattccaggcgcaagtcaaaaagtgctatccgcagttggttaaaaaacgagcgaaatttacgtaagatttagtaagatgcatcttacgtgatttttcctatatatttcatttagttaatgcaaatcggtaagatggtaatatccctataggtaaatatccatgaaaaatatggcgcgaaatccagcgaaaaaagacacgcaccccggagaaatcttaccaagattgatagatacagatagagtaataataataatattgttatttatcatatacttactatctatatattgcggttaattggttaaattttgcgcgaaatttacgtaagattcatcttactaaatcttacctaaagtggttcgaccagctgcaagccactgaatttcaggcataaaaaaaggtaagactgatttgctcaatcttacctaaattctggtcaacatttaatcatagaagcgacgatgccctgtacaacttgcgttcaaatccgagcttaaagttgtcaccgttcggaacgataactttaagatcccgatcgtcagcagccgccagcatatcccgatctccacgacggcaaactacccgcatttctcgcttaccttctccgccattgcctttatacctgtacgccacgatctcgacgtttgaaggtatgatgcaggcccaaacgtcgcacttgaacgaactggcaatattaaagtgcatcgcctcaatccaggatcgagcaaggtaaatcggcccgttaccgtcgtcgctctgattggtcactatcaccgatccgaatgtcagatcgccagccaacatcttctcccgaccctcctcatcaatgaacagcatgttgcaatactcatcatccggcccatcctcatgcactagttgcattggtagcgcgtgaattagctcctgtctgcagttctcgtgagtttttacgccaaccagatatgatttgatatgctcattttcaatgccctcatagagcgttacaggcgtgctatcgacggcctccgttctgtttaaaactgccatcactctttcatgatctgccatctttccgtagtcatacccgttatcacgagctacctgcttgtttctcttgactacgtattcttgcggaacctttccgagatagcgcccaagaatgttgatgcactcgctatacggctggccgcttaacttcattaaccagccgatccccttatcggcaccgcaaccgccacagtatgcgccgccatcacctcgcgtttccagcttgtcagtccagcggaatcggtctttgccgccgcagttcgggcagtcctggtgcttgccgttgaagtatcgagagtggatgccgcaaatgttctgcaacgcctcgcgccacatgccagccatgtacggcaaaacctctttttcatcgtaaaaatccacgtcgtaacccccaaataaaaaacgcctacacgagaatgataacccggcaggcgtttagtgtttagtcaaattgtgctatcggactacgcggagcatttcgcggcggtcgcatcggcgcgtcactggcttgccgttgctgtcaaatcttaaatcaggtcggcagaatgaggcgcgaaaacctttgcaattgttccgtcggtagctcttatgtactagataagcgccatcggctgagatcataccgcgcttacgccactgctgaacaacctggatactaactcccaactcttttgccgttccagcgataccaccgaaggcatcaataaccagctccatccgcgcagtcaacccagctcgaacctcatccttcagcacgtagtaaccagtcggtcgcttgcgtttcttcttatctttcccgcgcgacgttccgttgttgccgttcaaggttcgcttatcaaccattgccatttgctccataattcaaccctcatagcattttttgttaaacctgataaaatgttccatgtattatacacgcaactatgcgaatgacaaattaggattgacaatggcaagcacagaagaagacgtagcatattttaagcgactatttcgttatgaaggcggaacactgattcgcaaagttacaaccagtagtcgtgcattcgctggagactccgtagggtgcgagaacaacgttgggtatttacaggtaagcgtaaaaagcaaacccctatacgttcaccgaatcatttgggaaatgcataatgggcctatcccagaaggaatggagatagatcacatcaaccaggtcagaacagataacagaatcgaaaacctgcgactggtaagccaccaagtaaaccttaaaaaccaatcgatgaacagtggcaatactagcgggcacgctggcgtaagctggtttaagcgaggcggtaagtggagggcaacaataaaggttggcggaaggcaaatacacattggttacttcgcgtcgtttgagtcggcagttgccgcacgaaaagcagcagaaaaacaatatggttttcatgataaccacggagcagagaaaaagaaatgagcttatcgattgagcaacaaatagatctatacgcagacaaaatcccggcaatccaaaagagatttaccgttggaaatatcgttccgtatccatatcaggctgtggcttatattgagacagccaaaagaatagcaaactacaccgcaccgttttacattaaggcttcggtttccgccgggaaaaccatcatgatcgccatgctcgcagcgcagtgcaaggcaatgaacttacccatgatggttcttgctcgccaggccgagatcgtgaagcaggattccgaggagatcagtaacctcgacgttccaaactccgtttattgtgccgggttaggcacgaaggcggcatacttcccgatcgtcgtcggatctgaagggacggtggttaatggcctgtttaaaatgctgggcgactacgtgccttcagttctggctattgacgaatgccaccaggttgactggcaagatctggcggaagcgatcgccaacaatgaatcgttcgagtacatgagccgaccgaaggataagccgtatcgcgtgaacggggaactggtcgatgccgaccacccatacgacgaaaaattcgacgacgtagaattcggcggcggtcgcacgcagtacactatcgtcatttgtgagttaatgcggaggtgccttgagaagacagggcgagaacttcgcatcgttggctatactggttcggagtttcgcggcgtcattccgattttacaggaagacaagagccagcctggtttttggcgcgagcagatcaccgacattaacacaaactatcttgtcgagttcggatcggtggttccgacaatttttggtgatactgaatccgaagggttagggtatgacctatcagaattccacggttccagtcaggacggtacgcaggattttagcgcggaagaattgcgcaagatggaaaagaaaatccatgaatccggcgaaatgacgaagctgattatgcaaaaggtcgtggagcgtgcgaaaacccgaaacggagttctgataacttgcgctggacagcggcattgcaaggaggcggcgagctatctaccgccggacgcaacatacgcgatcatcaccgaaaagacgaactcaaagaaacgcggcgaaattttggataaggcgaatcgcggtgagatcaaatacatcttccaggtgatggccctaaccactggcgttaacgttccattttgggatttttctgtgatattgcgcaagatcgggtcgcttacgttgcttattcagcttttggggcgcggaatgcgacttctgaaggactggcaaaaacagccgccttactcgtgggtgaaagaagatcaccttgtctgggattttgccggaacaatggatgacctgggccagttgtatttcgatccgatcttggagcaggcgcaataccaaagacgcaagagcagcaagaacggcccgaaaatttgcccggtatgcaagggggaaaatagcgagtacgcccgcagatgcattcacaaagacagtaacggcaatcggtgcgaatacttctggatctcgcagaggtgcgaagaccagaaagacccgcgaacagggaagattaaaatcaaggggtgttacgctgaaaatgatattgttgcccgccaatgcagatgctgcggcgttcagcttaaagaccccaatgacaatctcaccgggaagcactatacgcagaatgactggtatgatgttgtctggttcgatatcggcttgactcgcaatcagtccgggatcatcttcaattacgtgttactgaaccatgacggcgagcgattcaccgcaagggaaaagttcttcccggaatcagagaatcagatttgcggcaagctgtggcggcaaaaggcagtcttccagcacgttagcgacgcggtaatgcgtggcaagttgggcggaatgaaaaacgcccgcaagatcctggagtatgcggaatacttccgcgcgccgaagcgcgtaacgcatcgcatcaacggcaagaaggaggacattatttcccgcaaagactttggaggcgaggagtgattacagacaaaggggattacctcgaatattacggcgggcctgtaaaggcttgcccacttgaaaaaatcgaccagatgaacagcgtttcgtggctgcgttacgaataccccgattatctgttctggcatacggttaacgagggtagcaagcacaaggcgagcgccgttgcagatcatcaaatgggattgcttaaaggcgtaagcgatatccttgtgctgattgggctgggcggaaaatacccgttcgccgccattgagctaaagcgccagggtaaatcccaggcatcgccagtgagcaaggagcaacgggaattcctcgccgccgtccgaagccgtggcgggttcgctgccgtggcctatggattcgagcagtttaagatcgcgtttgaagacgcaatcaaatagcactttttgttaaaactacccggcgcgagtcgggtattattctcccatcgaaacgaagaacggagtatttaaaatgaaaaagattattgctttaattgttctatctcttgttctcattggttgtagcgaaaaaccaaaaacatatatttgcggtaatgaatcgtttgaagttactagcgactatattaaggtggttcgcggtaatagcgctggcgttttaattgatggcattggtgaaaaccagtataagctggttacaccacttggaacggctttttatactgttaataaaaacaccattgatattaaagttagcgtttatcagaacactttaacttgcgaggttaagtaataatggcaaaagatatcacagacaaagacactcacgacgcgttcacgactttcgaacagcttgagcgtgaaacgttcataggcaacgcgcttgccactggcggacactatcaggccgtcaagcctgataaattctaccaggtaacgggcaaccgctacgccgggagcaagacgccggatatcgtccgcgacaagtggtcaaccgatcgcagccttattgcttacatggaggagcgttacgggccatacgacctggacgccgccgccgaagaaagcaacaccgtctgccctaagttttacgacgaaaagaccgattgcctcaagcgctggtgggggaaaaataagcacgtatggcttaatccgccttactcgttcccggatccctttgtgctgaaagccattgagcagatggagcatgacaaccagatcgatattttgcttcccggcgacaactctactgcgtggttccgcgacgcacagaaggcagcggctgagatcatttggattgtcgcagacgtcacggaggacgaagacggaacgcaactaagccgatccggtcgcctagccttcatcaacggcctaagcgggaaaccagtcgacaacaacaacaagggtagcgtgattttcatcatgcgcaaactcaagccgggcgaggagcaaaaaacgttctacgtcccggtaagcgaaatctgcccttcattaactaaaaagcgcatgcgcaaacgtgggatctgaaaaatggaacagcttgaatctttcaccgaatacctccacatcgtcgtcactctgctggacaagtacggcttcatcggtacggatgaagaaaagatggccttcgccgatagcatcgatggcacttatcaagaattcatggataacggcacgccgcttgctgactggcccgcgattcttgagcgcgaattgctggattttcgggcgcgtgaaggtgcggaatatttcgcgaaacagcactaattgttaaacaatgcccgccgcgagcgggtattattgttccatcaaccaatcaggagctaacgccatgaacaccaaaaccattgccgacaccatcaagatcgcacaagttaagccgcgcatcgtatctcgccacctgattaacctttctcgcctgtgcatggccgactacgtggcgaagcctttagagaatggccttgatggtgaaatcggtgcgatctacttccgcgccgcgcacggcatcgaagaaattcacatgtacgagcagatggcggaatgcttctgcatttacggtgacgaatgatgattgtagaatctggccgcgctgccgtatggcagcatgccaaagaggctggcattagtgacgatatcgtgatgatcgcaaagtatttcgatatcaaggatatctccattgtgttcaatgggaaatttacctatcttcatgagcgaccactgaagcgaacgcgtatagcggttgcgacgcgggcagaggccgacgcgctgaagatgttcattcacgaatctaagcagaccaaaaaatattacaagtagcgggagtgttgagaatgcgatatattgcgatcctgattacggcggtggttctcactatcgcaatcttcaactacgcaattcaattgggataaattatgcaacctaaaatcacagacgaagaatttttagccgcccgcgaggagggcaagacctaccgcgagatcgccgaagagttcggcatgaacgttcgcagtgttgagcgtcgcggcgttcgacttgcccgccaggggcatttgcacggtaacaatcacgtagcgaagcacatcccggacgggttcggggtcaaaggcacatcgaccatgattcgcgcgaacggtgatgaagttgtgcgctgggtcaagtcagaagtagaccgcgaccgcatgatcgctttgatggaggcggcgcaagcatcattctgcgaagacctacctcgcgctgaaccgcagcctaaggatgaatctaagttttttattgaggatcagctcgccctgtatccgatcttcgatttgcacatcggcgcgatggcccacaagcacgaatgcggcgagaactacgacaccagcacggcggaaagggttcttaaccgcttctttgactactccgtttcggttgccccgcagtcgaaaaagtcggtcttgctggtcggcggtgacttccttcacagtgacggcctggacgcagtaaccccggcaagtggtcacgttctcgatcaggatagccgttacgcgaaacttgtttatgtggctattcgctccttgcgccgagctgtgtcgctactgctgagtaatcacgaagaagtagaggtgcaggtaatcgaggggaaccacgatcaggctggcatgatctggttgcgtgcagcgctcgcagcgttctatgaaaatgagccgcgcgtattcgttgacgtcagccctgcaattatgcatcgtaccgtgtggggcaaaactatgctgggctacactcacggccacacgatgaagaaggcagaaacgcgcctcgccgcaatggctacagacttccgcaaggaatttggtcaatgcgactacatctacacgcattcgggccattggcatcaccagaccgtaacggagcactcgttagggattgacgaagtacacggccagttaggggccaaagacgcttacgccgctcgcggtggttggcgctcatatcgccaggcggcggttattctgtacagcaaagaatatggcgaagtaggccgctttatctaccgcccgaacatgtaaccacaacggccccgcgaggggccaacaaggaaaaccaatgaatagaaatatctgcattttcgatctcgatggcacgttgtccaatggcaaccaccgtttgcacctgctgccgaaaaaagatctccacctaaccgaaagctggacggcgttcaacatggcggctggcggcgacgctcccattacggacacgatccgggtaatggaggccatgcgcgcagcaggatttatcgtcatcatcctgaccgggcgaagtgatgaggcacgcgagatcactgaaaaatggctggtgcaaaatggcgcatcgcattacgacctgctgattatgcgctccgcctccgacaaccggaaagatacggttatcaaagaggaaattttacgcaagattggcattgagcgaatcgttgcagcgtgggatgatagccccactgttattgcgcacttccgtagcctgggtatcacaacttaccaggtctgcgactacggcgaaaaccttcacgaccatctgaaatctcatggagtagacaaatgaaaaatgtaatcatcctcaacggagcgccgggcatcggaaaagacaccatcgcggaaatcatcgcccgcaaatgggagtatcggatcctgagtttcaaatcaccgatgtttgacattgcgcgcgccatcctgggtgcaaccgactttgcccgcttcgccgtccgttaccacgaccgcagccggaaagaagtaaagtgcgactttttaggcgaccgctcgccgcgtgaattcctgattcacattagcgaaaatttcgtaaagccgacgttaggcaaaaagcagttcggcaagttgctttgcgattctgtcgtgaattcgcctgttagttgcgtcgtcagcgacggcggatttgacgaagaagtagagcacatcgcggcgcacgatagcgtaaacgtctttgtcgttcgcctgcatcgtgacggcatgactttcgagggtgatagccgcaagcatattagccgcccggatctgatttgcgaaacttatcacgaattcgattttgatatgacgactggcgagccggaagacgacgcgcaaaaaatccttgatatggttttcgaagggtattaatattctctacgtaatgcctttattatcaccgccttaaactttgggagccttaacaggttcccttttttttgttctttatttggcccaacgcatatatcatcgcattatcacttaactaacagaggttgcatatcatgcgtgaattcatcaacgcggcaaccaatggtagcggcggtgttaccctcgcaggctctgcgaccgggcaacttatcattgcggccattggtttatttttcatgattctattcggctcattcggcgcgtggttgcgctggcgagattcaaaggcgctgcgtgaagcgctggaagccggggatatcaaaacggcggtgaagatcaggagtaaataatatggggattaaaacgcgggttacattcgcagcggcgatggcgatcgctgtcgccttcctcccgaaagtggaggacacgaaatacaaggtttataccgatatcgctggcgtttcgacggtctgcgaaggcatcacagggccggacgtaatcaaggggaaaacctatacccggtcagagtgtgatgcacttttggagaagcacatccaggtcgcaaagcgtgtggttgacagcaaaatcaaagtggccgtgccggacaccttccgggcgtcgatgtacagcttcactttcaacgcgggcggtggcgcatactccggcagcactatgctgaagttgacgaaccaggggcggctatatgaggcgtgcgaacagctttaccgctggacgtactatcgcaacccgaagacgggcaagatggaaaaatcgcgcggcctgcataatcgccgggatcaggaattcaatctttgcattaaggatctaaaatgagtagcttaaattttcagcgagcattggcaatcggcttcatcgtgtgggcggtcgcactggtttccggttgtgcttccagcgtcccgatcctttccgatctggtgggcagcaagccggatatgacggcgcaagtcggtgcggagaacgtgaaacaggcggttggcgtgacgaacaaaacggacacgtccagcaagcaggaaacgaccttcaaagaatcggcagttggcaaggttgacacttccaacaaaaaggcggtgacgacctccagcattcacgcgaaccagattacggcggagaagatcgagatccgaaacgacggtagcggaagtgtgattccgtggctgattggtgcagttggtgccatcatgttcgctgtcggtgttttcggtatgtggcgggaacgaaaaaataaaggggcgtaagccccttttttcatatgtaccgtttgacgtgcagcagcgccacgccatcttcatcattcaacccatgttcaaccttgtttgtcgcggccatgccttgatatagcaaggtgagcgcggcacgcaagtaattttctggtgtgatctgattcacgcaaacaagcctgtgaacctccgttatcagatcttccacctgctttcccgaatagggcttcatcgtcgagttgctcaatgtgcatcatctcccacatgtatttgttttccatcccttcaaacgaccggaagttaaatccaatctccctgttatccgggccagtgcaccacaccacgccgttttttccgtccaggtatccattcgtatagcttcgcgctaaaaactccttagaaaccattgaggcgaacatacggtgtgacacgttggcagcttttgccatgcgtggcgattcgcggtgcatgtaaacgaacttcgcaaaatcttgccgggtaaattcccggcgagactcgcagaatcggtaaatgtcaaggataaacattcattacctcatgaacgaaggattaacgaacacttccgaatcaatcacgcagacgaaacctaattcctccatcttcggcagcaatttttccttaatccttttactcaccccggactgacctttgaagatcttcagattgcggcacgcgttatagatgctctgaacagtcatcacgcctttcgactgcttgcaacggctggcgataacatcgtacacggccttaatctccgcaccctcaccagcgaagccggacgaatcagccgacgacaaatacgttttgctcaactcatgaaacatgatgatggcttcgtcgatcgtttcggttccgatcttcttcgagcgcttgccgccaggttgccagttgcggatagtgtggattaccgacgccaggcgcatcacctgcttatcgaatttacccatcgcaccgcgcagcatcgtatgcgaatacttcccgccgtcgcctaattccggctctaactcctggcgggccttgttcagccgacgcatgcctgcttcagtcacttccagcttgatatacgattcagtcataatgtcatgaatgaggcggaagtaatcagcgcgtaaagacttgtcgatcggctcataggtcgaattccctttttcgtcaatgaacacacgctcacctaaccgcgtttgctcgcgaaccaaaaggaaacgctctgatacaccgataccgcgagaaccagcttgcatgatggcgtcgatggtttcatcctgggcgattacgcaaatacagcccagcgcgacgaatgacatattgttactgacgtcggaacgtgcgatcgatacgtggcccttatcccacgccttcaacaccagttcgctgttcgtcttcttgccgccgtcgttgccatacgtgatccctaacaggctgttaaccgccgtcgcttcgtccgagataaccgcaaagttgccttgccgattgttgattttcgccaggccttccggcgtggtatcggagacggggaaggtcagatcgcacatgctttctaacttctcctcaagttcgtctttgtcttcgaacagtttcgccatatcagactgcgataactcgcctttcatggcctgcttgttggcggacaacttcgccatgattttcttgcgctctttcttgcgcgcctcgttgattcgctcaacctctgcgacgatcggatcgatagccagcgagttaatcgcagacttaccagcggaaggcggctgcgacgtaatgacgtaaagcgtcgtcggttgctcgctgccgtggtactccacccaaaagcgacccatcatcgcggcggacacggttcctaggaaatgcatataagccgatgattccgggaattgaacggagcgagcggcattgagcgccagcttgccgacgatatcgtaatcattcgcgatcgagatcgtgggatacttgtccgcgtttacgtcgatatctttcggcttgggccagaaagaaacggagtcgcgatacccgttcgcacggatggcgacgcgcaaggggctgatgccttccttctctgcgatggcaataatatcttgtggggacacgcggtcatttaaaaacatgccttgctcctgattggttaatcgtgcggctaatgataagccgtcttaaatccgagatccagtgataatctaaacgcacttgcaaaatgtgcttaggttatcggggcgcatggccccgaatccgttacaggtatttcgcctcaaacgtggtgccgtccgacacgctgaaaccgacttcctcacggtagagcgtccagcggcaaccgtcacggtcgaagatgtatccggcgactccgcccagcgcacgaccgctttccacctggtaacgcttgccgacggtgaaggattttttcaccgggtttttgtggtcgaggccaacgcatttcagggttttcgttttcagctcgataaacgtcgccaccaccacgccgccgacgccagcaataaacaactcaccgctaatgccgaccgacaagcaaactcgcttcttcttcagttcggcactgttatataccatcattgacacgttgccttcgtcgtcaatgcgagcggaataaaggttgttttcctggatattaacagcactgcttgaggtgcatttaattttgattgactttgccattttatttcctgtctcccatttcgatatagaggtttaccagatccagaaagtcggatttgtttctgcaactcaatttaaagccaacgtgcgattcgatcttattttgcatcgctgccatcgttgcgccgccgttattcattttcaaaacttcgcggcatacatcggccagttttttagatatcatatttcaccaccgtaattttcgtgtttttgcaagcgtcttcgatatcgctgattaagcgcttcacccggatatcaatcattgttttgtggtgcatgacgtcaacaatcccgcaaacgcacaagatcatgattgcaaagaggaagccgcctgggcaagtcattgataatgcagttgctaacagcgcgataattaatttcattttgtttgcctcgttttgtttcgatggagtaactatacccgcaattaagcgggtacgtttagcaattcgtgctattcattaaaattagcctggaacacggcgcgagcgaatccgcgcggagtgatagaacgaagcatctttgttctttcagacttgccgccaaggaatttccacgcccaaaagaaatcgacgccttccacgccttcaggcggcaataaccgctttggctccacgaatccgttaccgtgccagatgcacgttttcttcgtgtaattgtcgcagtgcggcatttttgggtgccaaacttcctcatgcggcgcaacataccctccgaagtcgcgagggtggaaataaaaatccggcttgcgccaaagagtcgacaatttgccaaccgggttttctaccatccagggacaattatattggtcgcccaattgctcgatcatcttcgcatcatcggcggctgatagcacatcctgagtctgccgggcgtgcttcaccccgctatgcgctaacagcgtgcaggacgggaaagcgaaaataatgtcaggatccgggatgcccaggatcgtgcgcttcacgtcgaaatctttgtcaatccacatgttgacatactggattttggcatgctccatgcggattttgtactcgccgtggtcgccggaatcggcattgaagcaatacacatcgcaaccgcgaattgcccacggtagacccataatcccggaaccgtcaaacatgcaccacacaacgcgctttttcatcgtcacctcaccagaaagggatacattcgcggcaaccttcttcaccagtgcagccgcaactattttcttcttgctctgccagatcgtcacgcatcggcagactttcggcatccatatccatactgcccagggcatccgatagcgtcatttcctgattggctactttgatgcaatattcgcggttaagccctgcgtcctgggcggttaagaaacggtgccagtaggcatcgtcgtaattatcagccatttcttttcctccggttaaattctcgcaaactggcggcgcatgacttcgaacaggttttaccccagccacgtttaagatccgccgcctttaccttatagacggccccgcatcctggagcctcgcagcacttcatactttccttcgccccgatgtgatccggtcgaccagtcagggagctatcgccgggattcttcgtcgaccagaaaagttgcactgtcgcgacctcctcgccgaactcattaacgaacatgtaaacgcccttgcttttcagaagcacggtgcaatgatgcatttcgccgttgacttccaggtatgcgcgatcgccttctttcattagcttctccacgattcaatgaacatgctgttcgattccagcgtcagcgtgacgccagccagggaggacggaatcaggcgagcgcccggaaccgttccgacaacatagcgaccattcgatttggtaatcgtgatctgagtaaagccggattcgcggttcatgcggagaacgacgcggccatgtgcgttcagtacggcgagaatggaatcagtcttcggatggttcattgtgtaactccttcgtttgttggtgtggggacagtatgccactatccccaaattctgttttagcaattcgtgctattcgggaacgcaggtcgtgtaatcctggcagatgtagattgtgcgctgaacacgctgcgcggcatcctccaggctctgaatctcgatatcgttgctgtcgacccggcagggtgttgcaccgaagatgaaataccccgtctgcttgtcgttgatttgccacgccttgctttcgggaaccgtattgacgacaaacggcgtgtcgtcggctttgaagtcttcagggtgacgcccgtaatagtggatgattgcagcagttgccgccgccttaaacttttccgtcacgtcacgggcggcgatatcacgcgagatctggatatcaacatccggcgcgccgaccatgtaggtaaagctgttcgaaatggtaactgttctcatttatattttaacctcgtttcggtggatgaagtcggcgacatagtggcactcgatcgggttttcgatcccggcgagaacctcacagcgcccgttgttcagtaactggcaatgctggcaatcagacccgccaacattagctatgacgatggcgatcccgttgcatgaaccgccaaacattctgtgcgggaaggggtaagcctcgcaggtgcaaaccacctccccggccctccgctttctcatgcgctccccttctcgatgcagaagacccaatcgcgagcatcaaccgcgaagcgtgccacgccgtcgagcacgatgaaaacggtctgcccgttaacgccgcgacccttctcaatatcggtgacggtgcggaacaggtcgcttgcgccatattgaattttgtccccgattacgacgtcgccaaatgctttcatggttgatctcctgactggtttcgatgggttaactataccaggccttgcggcccggcgtttagcaattcgtgcttatttcactgctttcttcgctgccttgtacgcctctttgaaggccggaacatcttcgaccggaatccagaagccggatccataaccatcgtcatagcaagggcattggtcgcagtagtcgccccaggttttctcttcgccgccgacagagaatccagtggccattttgcataacgcttcctcaaccgcttcgatcttgtcggcgtcgctatccatgataacgaagttccacttgccgttatactcgctgcccaggttgattgattcgcgttgaagtttcatagctttagctcctttggctcaattcgtttcgttgaagtaatcatagcaaagtcgatcggatggcttttaacaaaaaatgctattcctgcgattgctgattattccaccgattcggaatagtggaatagatggtgattgcatttgattcactggtgattacttttgacgaatcatgattgcttgtgattgtttcattctgtgcaattacttggggaagtgtttcatgatttgcaacgaattgcata

SEQ ID NO: 254 - DNA, 50071 bp, synthetic construct
  source 1..50071: mol_type = other DNA
atgtctgaagaacgtagaaagcgcgtaacgaaatcgcactttgagggaaacttcaaagcgctatatgaaaaggaatttggcgtcgtgctggggcgcacggcagaaatgacgccagaacaattttttgatatcgcaaagcgttacttccagtgggccgaagagaacgcaatcaaggcggcggaaacggcaacattccagggcgacgttaacgagtggggagtgaacaagcctcgcattttcacgatcacagggttaagcctgttttgcggcgtgaaccagtcaacgcttgggcgctatcgccacgacccgaactatgcgccagttatggagtttatcgactccgtaatctatgagcaaaaattccagcttgctgccgtcggcatgattaacgcttctttcgtcggtaaagagatggggatcgataagccgccagtgctgaacatcgacgctatcgccggggataagaacgagatcaccgaagagaaattagagaaagccgtgaccaatattcttgataagctgtaagggtaggctatgaacgaaatgatcatttgggaagacctgtcgccagccgataagctggcaattaaggcactgagtacgcgaaacttttcgctattcctgaaaatctggttccagatcattcagggcgaaaagctaatgtggaactggcatcactcctacttttgccacacggttgatgaaattatcgccgggaagcgcaagagcacgatcgttaacgttgcgccaggctccacaaagacggaggtgttttcaatccacctcgcgccgtatgcgtatctcaagtgccggaaggttcgaaaccttcagatctcgcagggtgacgccctgtcaaaaggcaactcggatcgcgtgattaagatcttctcatcaagcgagtggcaggagctatggccatcaaagttcgggcgcaagcagatcgatgaatttcaggtcatggacgataacgaccgcgtaaggcttgaaatggtctcccgttcgtccggcggccaaatcgtcggtaagcgtggcgggtacatgacgccgggattcagcggccttatcgcgctggatgatatcgacaaacccgatgacatgttctcgaaggtgaagcgtgagaaaaaccacgtactactgaaaaacaccattcgatcccgtcgagcgaagaagaagaagggcgacgaaacgccaatcctttccgtgcagcagcgattgcacgcgcaggatgccacctggttcatgatgagcggagggatggccatcgacttcgatcgcattgttattccggcgatggttacgcgggaatatggcgaatcgcttcctgactggttgcgtcctgagttcgaacgcgacgtgctttccggcccgtcggtggttattgacggcgtagaatactggtcattttgggaggacaacgaatcgatcgagaaccttgttgccttgcgcgaggccgatctttatacgttcctttcgcagtatcagcaggagccaatcgccctgggtggcaacgtgttcaagtcggagtggtggcgctattacggcgattccgacaaggcgcacgagccacgcccggacaagttcgaatatacgttcatcacggcggacaccgcgcagaaggtcaaggagctaaacgactactctgtaatgtgctattggggcaagtatcgggatcgcgtctacttcattgacggaattcgcggcaagtgggaagcgccagatctccgcgttcaggccgaagcattcatcaagcagtgctggcgtcggaacaaggagtgtgggaaccttcgccggatctacatcgaagacaaggcgagcggtacaggtctaatccaggatttaacaaaggcggtaaacggcatgggcgagatcgtcccggtgcagcgcgataaagataaggtcactcgcgctatggatgcacaaccaatcatcaagggggggcgtgtcgtgctgccggacaatcacccattcgttgcagagcttgaggcggagatgagcgcgtttacatatgacgattctcatccacacgatgatatttgcgacaacgtgtttgacgccgcaaacctggaaatgaacctgagcgacgatccggtagagcgaatgaaacgccttgcgggattgaaaaagctgggtcgctaatacataatgtgggcctgacggcccacacttaaacaaggttgaaatatgaataacattaagatggacgactataatcaaatctttaatggtggcgctggttatgcgtcaaccctcgcgtctatcgcggcaagatttggaacaatgtcgcaggttgaagagttctatcatgaaaacggcatggcgaagaaaatcgttgacgtgatcccggaagagatggtggctcccggcttccagctaaacggcatttcagataacaccaagtttcaatcagaatgggacgggttaaatctggagccgcaaatcaccgatgccctttgctgggcgcggctgtatggtggctcctacgtcctggcgatggttaacgatggtcgcgcattgacttcagcagcgaagcggggtaagccgctcgaatcgatcgttgtttacgaccacgattccgtttccgtcgcagaggaggaaaccagcccgcgaagcccacgattcggaaagcctaaaatgtacgaggtgaagccgctaaacggcgggcaaccgttcaaggtgcactatacccgtatgcactacatcgacggcgagcgagtaaccaacaaggtgcgcaagctaaataatggcgctggcggttcggtgctgaacaagtcaatcattgaagctattcttgactacgactattcggaatatctggcaacgcagctactgaagcgcaagcagcagggcgtttggaaggcgaaaggcctggcgctaatctgcgacgacaaagaaggcgagtacgccgcccgtttgcgcatggcgcaggttgacgctaattcaggcgtcggcaacacgatcggcattgatgctgacgacgaagaatacaccgtgattaactctgatatttcaggcatcccggaattcttgtccgctaaaatggatcggattgtcgccctgtcaggcattcacgagatcgtgctaaaaaacaaaaacactggtggcgtaagcgcaagccagaacacggcgctacagacgttctacaaactggttgaccgcaagcgcaatgacgattacaagccgctgttagaattcctgttacagttcatcgtaacggaggaggaatacagcgtcgagttcgaaccgttgtcgctgcctaccgatgcggagaaagcggatatcttccagaagaacgccaacgcggctcgcggcctcgttaccgaccaggttattgacgccaacgaagcgcgtgatactctgtcggcgttaattcctgaactgaagctaaaaggcaacgctccgaagcagaaaaaacttccggatcgcgccgctggttcaggcagcacgcaaagcgcagagatcttaaacaacacggaggcggatgatgaaagttaacggcagaatcccaaactggcgttatcctgaagcaagcgagcgggatttatcccgctccatgcaggacgcggtgacagaactcgtggtagaaatgcgggatcgcttagaccgcctgaaatttgacgccacggcggaggagatcagccaggcagaagacgatatcagcgaatcggccatcgtgttcttttccgccgtaattgcggcgctttcctccattgggttgactatctatagattcaattctaaacagtggcttgcaattgcgattgcggctggcgggcggaacaacgaatcagttatgcgccttaaagaattcggcgctggcgggtatgaagactggtatcaagattcgttgaggaagtgggaagataccgccgaagcgtcgatcaggaagttagcaagcgatatcgttgctgactggacgacgaaagttagaaccgccaacaacattggcaagtctcgccagcagatcgatgaaatcatcgaagggcgctacgcgatttatggtagctggtcgcgcaaccgggcaagcggaatcatcggaacttttaacagtatgttgatgatgcagcgcctaaaagatgctaaagtgtcgcattacttttggttcggcatgatggatgaccgcgagcgcgaaagccatatcaagctagaaggtaagcgacgccctgttaatggtgatggcattttccccggcgaggagtacggttgccgttgctgggcggttccgtcatttgataatgaggatgattgatggttaactttaatgattactttaatcacgtaggaaaggatctgatatggaagcgagcaacatcaaaccgagtaaaagttggtgatgttgccgggtggaaagatgagcatgggtatgtatacattagattcatgggcaaactgcgacaagctcaccggatcatttgggaaatgcaccacggcacaatacccgaaggaatggaaatcgatcatattaaccatgtaacggacgataacaggatcgagaatttaaggcttgtaaccagaaaggaaaactgtaaaaacgtatcaatgagcgtaacaaacaagagtggagttgtcggcgtgagttggtgcaagagaacaggtaaatggtttgcatccataagggttgataaaaaagagcgattcttaggtagatacgaagacaaaaacgaagccatttcagcaagagaggcggcagaggtaaaatacaatttccataaaaatcacggagataaaaaatgaaaagagttcaaaggttcgacacggtaaagatgaaggcccgatttgatgagaatggctttctggttgacactccgattgtggcgcgtatcggtgcgcaaacgtaccagacgccaaccgggccgcgagtcgagttccgcccgcgttctgaggtgtttgatgctgaatcgctggcttcataccagggaaagccgatcactttgggtcacaagatggttaacgcgcagaatgcgaaaggcctggttgttggctcgtgttccggcgctggcaaagaagaagggatcggggttctcgttccggtaatgatttacgacggcgaggcaatcgagcaagcgaagaagcgcgttgccgctgaattgtcggttggttacacttcggcagatatcgatcgtaagggttggggaaacaacgccactggcgaatatcacttcgatgatgaactaccggaaaacttcgaagagatgaaaaatgattccgtctctgattgggttcgctttgatgcggtgcaaacgaagattcgcgtgaatcacgtcgcgcttgttttccgtgggcgagcagggattgcgaaattaaatcttgatagcgaacaagaattcccctatgatgacgactcaaaccacaaaggagctaaaacaatgatcattaaaattgacggcgtagatgttgaagtggccgataacgtaggcgcttacattgccaaactagacgcgcaagttgcatcggcaaccagtcaggtaacgagcatcaccgcagagcgcgacgcacttcaaaccaaagttgatggcattgaagatgaagttgccgcccgcgttgctaaaatcaaagccgacgaagacgcaaaacagaaagttatcgcagttgtttctgccgctggcgtcaagtgtgacggcctggatgttaaggcaatgaaagttgcttacatcaaagaggtagacggtcgtgatctgtctgacaaagaagattcgtacatcgacgcttcttttgactttatcgccaactctgataagatggctggcaatcgctccaaagtcttcggcaaaaaagaagatggcgagcaaaaagacaaaggcggcttaccgaaacttgacggcaccgaaatcatcgatccgcaggcaaaattccgccgctaataatttgcggccttcgggccgctaccagaccaaataaacaggagattcaaaatggcacagattccagcttcttattcccgcaagcgtgatattgctgtagcggggcagatcgctgatacgtcactttacaatatcgacggaacttgtgttgctgaaggcgatatcaaagctggcgtactggtggcttccactggcgcagtttccaatggccacaaggtagttaaaccagcaaccgcagcgagcgacgtcattgtaggcatctcgcagttctcgcaagcctactcgcctgaaggcaagtatgacgatgagagcgcagttaacgttatgactcatggccgcatttgggcgatcgctgacgcaactgttactgaagaagattgcgcgttcggttctttcgtcacctttaccgcaaacggcacagtagcgaagggtgatgccggggttatcaaaactggctacaaacacactggcgaatacaccaaaaacgcagatggcactgttctggtgaaagtgcaggtgctttagggcgctgtagctccagcggctacaactggcgacgctggcgtataaaataaggggcttcggccccatttttgcaccagaaaaaaacctttgacggcttaacgattcgtgatattcttcatctcgttaagctaaatacacaaacaggagttttcagatgactatgaaattagatgcattcgaacagagtgccattaaggtcgcaatgcagggcatgggcattgatgccgcaaaactggatgcttacggtatctggactgttaagcagatgactcaattactgaatcgccagtatgagcaggcatacccgcagaccagcgcacttgagcttttcccggtaactaccgagatctcgccgaccgcccgccgctttgagtggctcgaattcgatggcgtaacttctgcgaaaattatcgccgattacaccgacgacctgccgaccgttgaagcgatggcgaaagagaagtcagggaaagttttccgcctgggtaacgcgtggtttatttccatcgacgaaattaaaactggcgcggcgctgggttccagcctgagcgatcgcaaggcaactctggcccgcgaaggtcatgagacgctcgttaatgatctggtgttcaaaggatccgctcctcacggcatcgttagcgttttcgaccatccgaacattaaccgcatgaccgccagcgcggcttggggcgatgacgcagcagcggctgaaaaggcattcgaagatctggaagacctgctaaacatgatcgaagaaactacgctgggccgccatcacgcgaccaacatcgtgattcctccgtctaagcgtcgtcttctgacgaaaaagatgcctgacactagcggcgactcttatctgacctggttcaccaagaaccacccgaacatcaccattacggcgatggcggagctggaagatattgacggcgcaggcaccaaaggcgtgctggcatacgaaaaagacccaatgaacatgagcatcgagatccctgagcggttcaacatgctgccgatgcagccgaaagacctgcatttcaaagttccgtgcacctccaaatgcactggtctcatcgtgtaccgcccgctgactattgcgattctcaccgggatttaatcaaaagcgccttcgggcgcttttttattgcattgcattctgcaatgtgctttaatttgaaacctaaagtaaaccaatggagcattaacaatggccagtaaaaaagaaaccgtagaaaccgtagaaaccgtcgaaaccgtagaaaccaccagtgccgaacaggcgtcgcaggttgttcaactacaaaacgttggtgcatgtgcaattcgctataaaggcgcaaattacgtctatgagcaggtttttgaagtgccggaaaacgaaatcgaccgcttccgccacgaaatcttcaaaggccgcgtcgagttctacgacaatcaaaaacgcacgcgcgaatacatcgcagcagtgaaggcgaaagcgaaagagatcgtgcagcctaaaagcgcggaataacaaaaactaacaaagggcgcttcggcgtcctttttcatatcaggagagcgaccatgaattacacaattcaagatgtgatcgataaaatgcgcagccttgcacctccgcttaaagaagttccagatgaactgctgtctgcgtgggttgtgcttgccgaagagttcgtttgcaaatccaggttcggggattccatcgttacggcgatcgcattgatgaccatgcacctaatgtttttggatggagcgatgaagcaggaaggcgaaagcctggaatcttacacgcagcgagttgcatcgttcaccctgaccggggagttttcccaaaccttcgatcgcgtatcggcgtcaagcgacaacgaaatgctttctacgccgtggggcaaaatgtactggcgtatgctcaaaatgcgaggcggtggcttcggcctccttaccgccgggaacgtgcgccgctgcggaattggtaggtgatcgctatgaactacaaacaaatccaggcacgcgcaagcgcgggcattaagtttttcagtgacgctgacggcgtattcaacaagtacacgaaaggcgctggcggcggaatcgatccggaaaccggggaagatatcattcctggcgaggtggtaacgacaatcaagggcgcgatcagggatgtaaattaccgtgacattaacggcgaaaccatcctcgctggcgataagcgcgggtttttcactcatgatgtgccaatcatggagggtgacgaaatcgaagtagacggcgagcgctaccgcgtggttaatgcccgtccggtaaaaccaacgggaaccgttgttgcttaccgtccagttttgcgcagggtggcgacttatggctaattacacgatccgggagttcacaggggcaattgatgcatggtgtaaggccgctggtgatgcgctggaggacgttgtaaggtttacgtgtgaagatattcaccgcgacctcgtaatgcgttctccggtggatacagggcgcttccgtggtaactggcaaatcacctttaaccgcgccccgctttacgcgattaacgcatatgaccaaactggcgaaaagacaatccagaacggcaaagccaacattgcactatacgcaaaaggggctgggatcacttcgatctggttcagtaacatgctaatctatgcgaacgcgctggaatacggccattcaaagcaggctcccaatggtgttatgggagttgttgcgatccggttgggcgtttatgttactgaggcaatcaagcgagcgagggcgaaaaatgcattatgagatggcgttaaaatgcaaggcggcagtggctaaatttgccgccgagaacgggttaatggtcgcaggagataacgttgactttaagccaccaaaacacggtgaaacttatctcaagttctcctacgtagaagcggattccagatctgtcagcctttccagaacttgccgcgtttatctggctatggtgcagattgacgttgttttcaaacccgggatcggaaccgacgccgcgcggctaatcgcgcaaaacgttgcaaaatccttccccgaaggcaaggttgttgattctgaaagtaagttatatgtgagcgagtgggcggaagtgtaccgcgttcagaaacacgaaacaggctggctcctacccgttcgcttcacagtaagatgcgaaagcgcggaggagagcggttatccatcaacatgactggtcttagaggtgcttataatttcttgccagcctgtaaatatataggcataatggcgttgttaaactttcatcaaaacaggagtattcaacatgcatttaccaaacggtgcaaaggtcttctttgagaaggctcgcggtgcggccattccgtttaccgcaatgaccaacgacgcgaaaaacccaaaaatcacagtggcggacggcaagctgaaggtgaaagatattgtgatcttcaccgattgcacctggggcgacttcgttaacaaggtggctcgcgtaaaagcagtgacagcaggtgtggcaacgctggaagagttcgatacctccgacactaacaagtatccgggcggcgcggccactggtaacgtgagcgtgatcactgattgggtcgaattgccttgcattcaggatttaggcaaagacggcaacgaacagcagttctataactatcagtgccttggcgatgagcgcgagcaatcagaacctacttacaagtcggcggtgacgcttaactacacgtttgcgcacgattacagtaacgcgatctaccctgtgttgcgttcagccgacgccagcaagcaggcgagagcgatgtacatgtatatcccgcgagcttccgaggttcgttactggtctggaattgcatctttcgatgacattccttccacggctgttaacgagatggaaacggtaacgcttaacattgcgcttaaaggtgctcacgtcttccttccggttgtcgtgtaattaaatggcggggcttgtgcctcgcctttttttgtgcataatagcgaataacacaaaccaatcaggagttaacaaaatggctaaattcaaaattcaaattggcggcaacctcccttctttcaaactgcccgtaaccttcacttgcccggatggcaaagaagcgaccatcaccatgaccgtaaaacatcgctccaccgatgagatgaaagacttttatgagagcgaagataaagcgccaaagggtaacgccgagtttatccgctttatggccgaaggctgggatcttgatgatgagttcaacgacgaaaacatttcctggctttgcgctcacttcccggcgttcgtcatggcactgccacaaacttacatggccgcgcttgcgggccaccgtgcaaaagtttaaggcgggctgtttatctcacgcttcagcctgagctaaccgatcgccagcttgccgagtacgggttaaggcgatcggattatgaggcagatcttgaaacgatctactttgatgaacagaccgcccaaagctggcagctattccaggccatgcaaacgcagtggcgcattgggatgaacggcccaacggggcttgactataatacattgcctatgttcttcgaattgtataaaatcgacaatcgagaagcggcattacttgacttgcaaatccttgagggtgaatatctgaaggagatttacaagaaatcaaaataagcgcctacgggcgcttttttcatatgggggctaaacatggctgataaagtagctgggttgacgtttggcgttgacgtttcgcaggttgataaagcggtacgatcactagcagaactgaaaaaccaaagccagcaaacaggcgctggcctacagtcacttgcggacgctgaaaggcgggccacggcgcagaccgaggaaatgaaccgcgcgttgcagcgccagaagcaagagactgacaaatcaaaaaccagctttagcaggatcgcaagcgccatcgatccaacgatcgcaaaaatggccaacttgcgcaaagcgacggaagaacttgataaagcgtgggcgctgggtcttgttccggacaaggaatttttccgccttggcgctatcatcgagtctaccaccaaccaactccggcggcagcaggcggcgctaaccgaagaaggtcgcgcagcaatcgcagaggcggaggcaaagcagaaggcggcaaacgccgggcgtgattttgtcgccagtctgaaacagcaggctgactccatcgggaaaacacgcgccgaactgctggaaatgaaggcggcgcaattgggtgtatctgcggaagcggccccgttcattaatgccctgaagcagcaagagcaggcgttaaagaaacagcagaatgcgatgggcctggctggcatttctgccgggcaatataaaatggccatgcgccagttaccgatgcagatcacggatattgtaacttcccttgcgtcaggtatgccaatctggctggttgcggtgcagcagggcgggcaaatcaaggacagcttcggcggcttgagcaatacgtttaaggtattgttgagctacattaacccgctaacggttggtgctgcgtcgttgggtatcgccctggcggcaatcgctaaagctggttatgactcctggaaagcgcaacgagaactggcgaatgcgctggtgctgactggtggctatgctgcgaccaccaccgggcagatcacagccttaaccgaagagattaacaaaaactcatcggctacgattggcagcattcaggaaatcgcaacatcgctcgccagttctggtaagtacacaatcaaccagattaagcagatcacgaagactacggcggaatggtcggcgcagacgggtgagagcgagaagacgatcacagggtattttgattcgatcgcaaaagaccctgttaaggggcttgccgatctcaatgagcagtttaatttcctgaaagagggccagctaacctacatcgaatctttgcgtaaaaccaaaggcgagacggcagcagcagaggcggctacaaaactgtttgctgatactatggataagcgccttaaagatatcgcggacagcgcaacgccactcgaaacgatgtggacggatatcaaaaaatgggccgctgactcatggaaatgggtaggcgatcacacggtaggggcgctaaaccttatcgttgatacggtttccgcgatcattaacacgatcaggaagctgattgccgacggcgacgccatgatcgcgcagttcatcgttgacgctggccggaagctgcaaaaaattccaggaatgggcgactttggcaatgaatttctggcgcagcaggagcagctaatcaaggactcgaaagcgaaatccgacacgcttgcaaaaaccattgcggaacagcaggcaaggatcgcaaaaggcgaaatgggttacattgatgccgcgaaggataaaaccctttccggtgggtacagcagcaaaacgaaggatcgcgtaaatcaggaagaaaaagatatcctgaaaaaccgcaacgccaggaagcagcaggtagacgcgggcgttaaaattgatgagcagtatcaggctgaactgctatcgctacaggcgcagctaaaggttttgcagcagcacaaagggcttgacgacaagatcagccagcagcgcaaagactacttcgagacggttgctaaattccaggttttggaagaggcaagccagaagcgaaaactgacccaaagcgaacagcagatgctggcgaacaaaaagaatatcctgtacatggcggaacaaaaggccattgtgggagatcagattgttcagcagcagcgactgaacgccttgcttgacaagtctaccaagtatcaaaaccagatggcggagaagaccaaggcgctacaggataccgccggaatgggtagcaaggagcaggagagataccgggccaatgcgcagatggcggctgactggaaaaacaacggcggatctttaagtgaccctggatttaaagcgatgcaggccgcaagcgataaattctacgcacagcaagatgcgcaaatgatgaactggaaggccgggtttactaacgcgtgggctgacattggcgaagaagttaatgacgtatacaccaatatcggggatatcactaaaaacgcatttaacggcatggcgagcgtgctgactgattttgtcatgactggtaaggccagctttagcgacttcgcaaagagcgtgatcactgacattaccaacatgcttatcaagatggcgctgtttaactcgctttctgccgcgtttggtggtggtggaacgttcagcttcgccagcatgttcagcaaaggcttttctggcggcggttacactggcgacggcgggaagtatgagccaaaaggcgttgttcacggcggggaattcgtattcaccaaagaggcgacgcaaaggttaggcccggaaaacctgtaccgactaatgcgcggctatgcaagtggcggcctggttggtggtaacgcaagttccggatctggaatcaccaacggcggcaacgtcgcggcgtcggcggctatggtgtttaccattggtgatattaacatcacgatgggttccggtcaggatagcaaggggctagagcagggcgtaaggcagatcgtgaacgatatgttcaccgaggctttgagccaaaacgggcgcattgcgaagttcgtcaatgagaaaacgaggaggtagtagtggattcctttaaatggtgtacacaaatccaaggaggggcggcgaaagtcgccgtatccaataacgttcgggcgatcagcttcggaaatggctacatccaaactgcgtcgagcggcattaacacaaagcgccggactgttccgatcgtttatggcggttcggattgggaagcggtttataacttctgtcaggatcacgtaacaaagccttttgtgtggaaggcaccggatggaagaatgggcgtgttcgtcgtaactgccgactccgttaaccttgcgccgcagggtggcggggtgtttgaggtaacggctgaattcgccgaacgcttcacttcagccggataatcaaaaagcgccctttacgggtgcttttttttggcctatgatctggagtcaattagaggagggcttacgatgacagccaatgtttcaaaagattttgcgaactgcctacaaaaacttttccccggcgagatcctaacgctgatcgatatcgacgccacaaagttcggcgggcaggtctaccgattccataacgagaacgtcgcctatacaaccgaggagcttttggccgcggttaacggcgggacgcttcagccaaagatgatcacgtttcgcggcgagcagtacggcccgcgaccgttcggcctgggcgggatcgcaatgtcgagcgatggcacagtggaaaagccaacgctgacggttagcaatattgatgcgcaagcgagtgctcttattcgagcctataacggccttatgcaagccaaagttacggtatgggttttggtcaaggaattgctacaaaacgacggcagcgttaaagagggcgattttaggcgatttatttactacatcgagcgcccaaaacaggtcgacccgcaaaaggcaacgttcgaattaacatccgtgtttgatatggatggattaatgatcccggcccgtctgacgcaaaccgtttgctattgggcgcagcgtgggtggtacaagtctggcaaaggctgcgactacaacgggcagaacggatacttcgacaagttgggaaacagggttgaagacccgtcgcaagatgtttgtggcggcttggtttcttcttgcaggcttcgttttggcaatgaaccgttgagttttggcggttgtgcgacagcaacattgaaaagtggaaggtaatatgttaactccgaaaatcaaaatgcagatcatgcagcacgcgaaagaagtttacccgcatgagtgcgcaggtctggtgacgcaaaaatcacgagtgcaaaaatatcaccgactcgacaacgtttcgccagatcctgagaaagaatcaatgcctgatgaaacgcagtatgcgctggcatcaatggagggcgagccgatcgccttcgttcactcccacactggcgatggggcaaccacaattccgagcgccactgatttatgcttttgcgatgagtctggcttgtcgtgggttatcgtctccatcccggaaggtgatatgcgaatcattgagccgaaacgccgacctctgattggtcgcccctgggctttgggcgcttacgattgctatggcctaatcatggattttcacaagcgccacggcgtcacactaaaagatcggcgattgccgttcgaatggtggaagccggaatacaaagagaatctttaccaggattactggcaagaggacggattcattgaaaacactggcgagcctgaagttggcgatatgatcatcttccagattcaggcggaaaagtggaatcacgctggtatttacgttggaaacaataacatccttcatcacgcgtttggcaagctgtctcgcagggatatctattctggatggtacgagcagcacaaggttttaatttgcaggcacaaggagcttaaacatggcatcacatacaaagacgattaaactatccggttccctggggcgtcggttcggtgtcttccacaaacttgcggttgattcagtcgctgaatgcatccgggcgctgtcttaccaggttgaggggtttaagcctttcatgcagagcaaggttggtttaaatatgcgcttcggcgttgtcgccgacggaaaaccaatcagcgcgaacgaccttgcgacttttgccgtggcgagggagatcagaatcattccgatcccaaaagccagaaagaacggcgggttgttgcaggtcgttatcggagcggcgattatggttgcggccttctttactggcggcggctcgctggcggctatgggcgctttttcatcggctgcattcatggctggcggctcaatggttttgggtggcgtaatgcagatgatcgcaccgcagatgggcggcaatatgcgggcgagcgaatcgcctgagaataagccatcgtatgcgttcggcgggccgattaacaccacggcggcaggttatccaatccagttgccatacggttacagattggctggcggcgcattgttcggttctggatcttacgcagaagacaacaactaattaagccattcgctttttagcctgggggcgtagcctccgggctttttgtcgtgtacaattgcgagactattaacaggaggctaaacgatgactaatatcaaggcccgtaagggaggctcaagcaagccgcgtaccccggtagaaatgccagataacctgatctcaaaagacaagatcaagttattgctggctgtttctgatggcgaggtcgttaacgacttcagtttgaagcagttgcatttcggcggcgtcccggttcaaaacgaagatggaagttacaactatgaaggcgtgattgctgagtttcgccccggcacgcaaacacaggactacatccagggcttcagcgaatcaagtgctgagttccaggttgctcgtgaagtcactcacaacacgccttatacgcttaccgtatcgaacaaaaatctgtctgctattcgctttcgcctgttatggccgcgcgtgctgactcaaaaagataacggcgatatggtcggatcggttgttgagtacaagatcgagatggcggtagatggcgcaagttatcagacctacctaactggcaaaattgacggaaagaacacgactggcggttacgatcggagcattcgcgttaacctgccgcaaaacttcacgtcgcaggttcttatccgcgtgagccgagtaacgccggatgctgacggggtgaaggttgtcgatgccttccaggttcaatcctacgctgaggtcattgatgcaaaattccgctacccgttaacggccatgctttacgttgagttcgatagcgacctgttccagaaccagatcccaaccatctcactcaaaaagaaatggaaaattattcaggttccgagtaattacgatccgattaatcgcacatactccgggacgtgggacggtgtttttaagtgggcgtggagcaataacccggcatgggtgctttatgacctgatcatgaatcagcgctatggtttagaccagcgtgagttaggaatcccggttgataagtggtcgctgtatgaggtggcgcaatactgtgatgaacttgttcctgataatcgcggcgggatggaaccgcgctatttgatggatgtaattgttcaatcgcaggttgaggcgttccagttggtaagggatatttgttccgcgttccgtggaatgacgttctacaacggggaaagcctttcgattatcgtcgataagccgcgcgatccggtgtacctgtttacggctgataacgtcgttgatggcgttttcgttcggacgttcccaagcgaaaagacgatgtacacgtcgtgcaacgtcatgttcgacgacgaagaaaaccagtacgaacaggatgttgaaccagtattcaaccctgacgcagccatgcggttcggccacaacccgaccagcattacagcgatcggatgtaccagaaggacagaggcgaaccgccgtggtcgctggattctgcaaacgaacctaagcgccacaaccgtttcgttttctactggcctggaaggtatgattccttcttgcggcgatgtgatttacgttgcagatccgcattggcaatcggcctttaacctggtgctatcaggccgcgttatggaagtgtctggcgtgcaggtgttccttgcctaccgctgcgacgcgaaggctggcgacactctgatcctgaatacagacgacggcaagccagtgcgccgcacaatcgccagcgtttcggcggacggtaagaccatcacgctaaatgttgggtataactttgacgttgcgcctgacagcgtattcctgatcgagagcgatcagcttgcagcggaacagtatgtagtaacccggattgaaaagggtagtgatgacgacgaatttactttcgccatcacggctacgcagtacgatccgaacaagtatgacgcgatcgataacggggtaattaccgatggccgaccaacttcggttgtcgaccctgattcaatgggcgcaccgaaagacttaacgattagctctttctcccgcattgttcaggggatgagcgtcgagacgatggttatcggatggtctgccgtgcagtatgcaaaactgtacgaggtgcaatggcgcaaggacggtggtaactggaacaacgttccgcgcactgcgacaacgcaggttgatatcgaaggcatctatgctggcgagtatcaggcccgcgtgaggtgcattagcggtgggaatgtagcgtctccgtggtctgaattggcaaccgccacactgaccgggaaagtcggagcgccaaaaggcccgattaacctgtttgcgtcggacaatgagatcttcggcattcgagttaagtgggctatgccggaaggagcggaagacacggcatacattgagctttaccagtcgcaaagcggaaccgatcaggacgcaagcctgcttactctgattccttacccggcggctgaatactggcactcaattttgcccgctggctacgtgaacttctacaaagccagaagcgtagaccggatcggcaatgtttcagaatggactgattacgctcgcggcatgtcgtcgactgacgttaacatcatcacagatgcgatcctggatgaaatcctggatagcgacgcgatgaaggaactacaggaaaacgcacaggatagcgcggcaaaactcaatgactacgcgaacagcatcattcaaaatgcgctggcgaatgatgcggacgttaggaaaatgacgaaggagaacggtaagcgtaaggcagagatcgcgcataccacggtgctgattgccaacgaatcagaagcgagggcggctgaaattacgcaacttaaagcgcagattgatgaagatatcacgtcgcagattacgatccttaacgaagccctggcgacggaaagcgagacgagagcaacgcagattggtcagttgcaggcagattttgcggctgatattgacggcgtaaaaacaacaatgaacgctggttttacgcaggttaatcaggctattgcaaatgaaagtgacgcgcgtgcaagttccgaggcggcactagatgccaaaatcgggcagaactccgcagcgctaaaccagaaactcgactcgtgggcgaacgttaatggcgtcggttccatgtacacgatgaagttgggcttgaggtacaacggtcaggagtatagctccgggatggccctacagcttacctcaagtggtggaagcgttgtttcgcaggtgctgttcattgctgatagatttgctatcatccgtaatgcggcgtctggcgcgtacacgctaccgtttgttgtgcagaatgaccaagtgttcatgaataacgcgcttattcaggacggttcgattaccaacgcgaagatcggtaacgtcattcagtccaacaactttcaggagaatgttgcaggatggaggcttgataaaaacggcgtatttgtcaactatggctcaacttctggcgaaggttccatcaagcaaacgaaccagaacatcactgttcgagatggtagcgggcgcgttcgttgccagttgggtaggatcactggatcatggtaaaattaatgccgggagaaatcccggcttaaccaaaggaggcagacaatggcttatggttttcaatcatgggatgcgaacgggaaccccaacaactatgggatcgtccctgtttcagttgctggatatattgcattagcgcaaggccagaaaagcggaacgtggtattacaacgtcccgcctgggttgaggcttggtttcttttgggtcgcaaatcaagaccagtacggcacatcgaagaggcgaattaccgttagtggtaatcagatcgttgtttcagatgcgccagatgatgcgctggaatcaggcgtctacccggcgacgcaaggttttattgtcgttcaaattatgagttgatgattatggcagattacggaattttacttaccaatgatagcggcaatgtttgggtttcgcctcaaagcatcccactggcactactatcaaagcagagcatcactcttaggggtggtactaactccgatgaagtaagatcggtaacttacgacacgaatcacccatgcgttccgttcgtggtctttcatggatcttcgccacaaggtgcattcacaaaaatcaagtacagcggaaacacttgcagcgttgttttttcttttggtaagcaaaacgtatatgcggaggtttattttttctccgtgttcccacagccaaatcctggttatgggcttgcaatttgggatgaaaacggcacgctgattttgaccaatgaaaccagaacactttcagacgtacagacctacggcactggttttaatctaaacgtcactaacggcgggaagtgggcggttagtcctgttcagttaggcgcgatcgttggtgttgttcgcgatccctacccaagaccatttcagggcgactattgcgcagcggcattctttaacggctcaagcacgcaacttaccgcatatctaacgcaggcaccaggaggagccgccagcgatctaacctacgtcaatatgaaaaacacctgcatcgctattgattgcgcaagatacgactaaaagaaaggggccatacggcccctttttctaccccttgagatttttgatctcctcttttaattcatcaacttgagcagacagagctttgattgcgcaaattgcatccatcaaaagagcattattgtcaagcacaagtttcttattttcaactacgttaccctcatcatcctgataggatgcgctgctttctttaacgtagcacgaatcgatatctcgcacctgctgtgcaataactcccctacgctcgcgtttcttaacatcatccttataggtgaacttgaccagattcattgctttgatgttttcgagtgactgcaaaccatcataagcaacaacattgtctttgtagttaatgtcagatagaccagcaaaaacaacgttgccataagcagtgcttgcaatattaccatctgatttaaactgccaatactgcgtattaccgccagttccccatttgctgacctcaataacggcacgatgttcataacccctatgttcctcaagccacatagcgcaacgcgcaccgttaccattaatgttgaaccgtgagataaatgatggagatttaaggatatcaccattattcccatttggatcgctagttggccacgctacaaaagcatcattaacggtactcctcacagtcccatatgacacaacacttccgcgaagatcggcagccccgccaactcgcaacgtgctcgacattgtaacagcgccgcgaagatcggcagccccgtcagcacgcaacgtgcttgacattgtaacagcattgctaaagtttgcattcaacccggtaacagcaaagttcgatgcatcaaaaacaacctgcttcgcgctgttcatatctccattagggcggaagtacattccttgaccattttcagggattgagtacacgatcgcattgctgttatttgccctaatagtgcaaccgttcagggtcagcgtggcgtttcctccaggaacgctaattgcctgcggctggctgaacgtgttagctacgttggtgcgcgggatcgtattatcattagccatcaaatagtcagacggtgaattatacaattccagaaggctccgtgtcaatccaggtataaccagtgcgatcaatgattggccccgtaatcgaccctttgttagcctgtacgtttacatgattcaaccacagttcaggaacccatccgccgggagcatgaatataaacatcaaacgaggagtctgtgtttttcaccaccccaagattaatgcgtctggtgtcgtttggtctggcagcaatcagggtgcgctgagtaaaccaagtgtcaatattattactggttagcgtatcgggaagaccgcggccagaaatcgaaaagatatcaaccgggagatttgcagtgccataaccagtacctccgccaatgatgaactgagcaaatgcgtagccatcaccagcgttcttgacgttggcgatcttcatccacttctccccagcgaaagtgccagtaattttatccggcacctggacgccagccacaaggtcgacaacctgatcacgaagattttgcgtctgccccttcgcagtttgcgcgtcgttcttcgccgagttggccgcagtttctgacgcttttgcattggtctccgaggttttggctgcggtttctgatgcctttgcattggtctccgagtttttggccgcagtttctgacgctttggcgttggtctctgaggtcttcgctgcggtttctgatgcctttgcgttagtctccgacgtcttcgcagcattcttggatgcagcagcattggtctctgaagtctttgcagcggtttctgatgcctttgcattggtctccgaggttttggccttattctccgaagatttagcgttcgtctctgaggtcttcgctgcggtttctgacgctttggcgttggtctctgaagtttttgcagcgctttcagacgcagccgcagccgtagcgcttgcgcccgcagcttcggaatctgccctcacctgatcggcaagactttgcagagcttcgaaatcgaagttcttaaagaagtcgacagcatccgcaatttgagtttcctgtgactggtagtagcgcagagtttccgcaacatcttgcgccagtccgtcaacggtcagcgagtcacttaacaggatcgcgtaatcgctagacgctacgacagcgccttttgtggtgatggctttaatttcagtatcgctaaccaccttgtttacgacggccatttgaattggtgacgacaaaaacataatcgtcgcaccagggcgaatcagcgaaagcgatgattgccattttgtgccagtcccggtaacggttccgtctgcggccatagccgctttgccttctctgtatagtgccatgtttttaagcctcattggttgattgagtaacgcagataatagcatcaatgaaccgataaaaaaaggagcctttcggctcctttagttgtcaaattagaacgggatatcatcatcgaaatccatccccgcattcccgccgctgttttgcggcttaggcgcttgttgcggcttgggttgttgaggctggccccacccggattgctgattgccgccgccgctttgcgaaggatcgcgctggctgaattcgagttgcggcataatcatttcgttgtggctgtaaattgtgccgttgtgctcgcggttaacgatctgaagcgtccggcaggttacgctgatcaccttatccatttgcagcgcttcgtcgtaccacttaatcatgttttcttttgcaaagaaaactgcgcggtagttcgtgtaaattgtttcgtcctcgccatcacgattgcggatcttcatccgctccgacaggtctacggcgtacattttccacggcccgttattgttgctgccctctttgacataaggcgcttttcggattacccctgttacaacatgcattgtcattcctatggggcggcttcccgcccgttaaattagttgaaagatgaaatatcttgcgcttctggttcaggttttgattctaccttttccggctcgcgcttcgcaacctcttgcggtttaccggggttaaatccgtttgccggggtgactttcagttctgcctggcgtttggtgatatcgtcttccgtcattttccactccgccggggttaacgtttgtttcgccagcttatagatctcacgaagcgattcgagatcttcgcacgcgtcaatgcgttttttgaagtctttcggtgtcattttcgtaatttctgcatcatcatccgcctgcttgatacctagcgctgcggccagcgcataacggcgggcgtaagatgttgttgagccgtatgcttgttcgacggttttactgatcggcatattgtactgaaacgccatgaactcgccgctttcatgcaaaaacatagtttcgaggtgcatcaccttttcggtgctcgtatccatcatggattgaatgaccataattttgttcttctccagcgccggggaaatagcgtcgaggatatccccaagattcgcataggtgttcccaagatggttgttcttaccgcttttctttgcggccacgaagccagattttgccttgattaatgcggctgcgatggtggtaaatttttcagatgtacgcatgataaagtttccttttcctaattggtaatgcgcactatatcacaagtgcgcaccagtgtttagctatttgtgccgtatacgtccgggaacatgtatttcacaaactgaggagtcggcaaaacaacttccgccgcgtttgactcatatgatggccatgaatcgtgcttcacgcattcagcatactgatgaatcacgctttgatactgtttgcgaccgatctcgatctgctggctggtcagggtgaacgccagcggagcaaacggtgattttttctcctgcgttagcagtctgacaactaccgggcgtttttcgttgtaagtcttcacgaacagatcgcgctgcaatgccatcttgagatagtagcccaagttgaaggcgagtcgcccgaaatcgtcaggcttggaagattgcgtggttttgtagtcggtaatcaccacgacctcgaaaacctcatccgggttgaacccccactccttgatgagttcgggatcggaaacaacgtcaacatgatcgagtcgaaccttaaccttgacgccgaagatctcaccgaagattgacaattcacgctgtgctgtaggcgattcgatacatgcggcgtgtcgcgggttagccagcatcacgctgcgcatttgaacaacggcatcgaaatcaacatccttaaccagcttgcgcccggagtttatcgcggcgctttcgtcgcacagttcaatagcccaccaaacatttacgtcaatcccggcgcgatatgccatttccagaagttccgggtaatccttgttggacgtcccaatcaggccacacgctttcagcttcgcagacagtgccgacttcgacgtaatcagatctttaacctcgcccggagaagtcgcccgcaggtactcgccattaaactttgccgtctcaagcatacaggtatgcgaacaggttccgaacgccagcgcggctgcttcctcacgcactttgaatttccagtgcgccggggatgttgcgtaaatctcgccgaggcttgagccgctaacgtattccgcgcaccaggagttaggatcgtggtaatcatcgttggataattccgcgttggtgtatgccttaaaaattgcttcagccattggtatcactccatttgtggtttcgttgcgttaagtatacgcatgacgattccaggcgcaagtcaaaaagtgctatccgcagttggttaaaaaacgagcgaaatttacgtaagatttagtaagatgcatcttacgtgatttttcctatatatttcatttagttaatgcaaatcggtaagatggtaatatccctataggtaaatatccatgaaaaatatggcgcgaaatccagcgaaaaaagacacgcaccccggagaaatcttaccaagattgatagatacagatagagtaataataataatattgttatttatcatatacttactatctatatattgcggttaattggttaaattttgcgcgaaatttacgtaagattcatcttactaaatcttacctaaagtggttcgaccagctgcaagccactgaatttcaggcataaaaaaaggtaagactgatttgctcaatcttacctaaattctggtcaacatttaatcatagaagcgacgatgccctgtacaacttgcgttcaaatccgagcttaaagttgtcaccgttcggaacgataactttaagatcccgatcgtcagcagccgccagcatatcccgatctccacgacggcaaactacccgcatttctcgcttaccttctccgccattgcctttatacctgtacgccacgatctcgacgtttgaaggtatgatgcaggcccaaacgtcgcacttgaacgaactggcaatattaaagtgcatcgcctcaatccaggatcgagcaaggtaaatcggcccgttaccgtcgtcgctctgattggtcactatcaccgatccgaatgtcagatcgccagccaacatcttctcccgaccctcctcatcaatgaacagcatgttgcaatactcatcatccggcccatcctcatgcactagttgcattggtagcgcgtgaattagctcctgtctgcagttctcgtgagtttttacgccaaccagatatgatttgatatgctcattttcaatgccctcatagagcgttacaggcgtgctatcgacggcctccgttctgtttaaaactgccatcactctttcatgatctgccatctttccgtagtcatacccgttatcacgagctacctgcttgtttctcttgactacgtattcttgcggaacctttccgagatagcgcccaagaatgttgatgcactcgctatacggctggccgcttaacttcattaaccagccgatccccttatcggcaccgcaaccgccacagtatgcgccgccatcacctcgcgtttccagcttgtcagtccagcggaatcggtctttgccgccgcagttcgggcagtcctggtgcttgccgttgaagtatcgagagtggatgccgcaaatgttctgcaacgcctcgcgccacatgccagccatgtacggcaaaacctctttttcatcgtaaaaatccacgtcgtaacccccaaataaaaaacgcctacacgagaatgataacccggcaggcgtttagtgtttagtcaaattgtgctatcggactacgcggagcatttcgcggcggtcgcatcggcgcgtcactggcttgccgttgctgtcaaatcttaaatcaggtcggcagaatgaggcgcgaaaacctttgcaattgttccgtcggtagctcttatgtactagataagcgccatcggctgagatcataccgcgcttacgccactgctgaacaacctggatactaactcccaactcttttgccgttccagcgataccaccgaaggcatcaataaccagctccatccgcgcagtcaacccagctcgaacctcatccttcagcacgtagtaaccagtcggtcgcttgcgtttcttcttatctttcccgcgcgacgttccgttgttgccgttcaaggttcgcttatcaaccattgccatttgctccataattcaaccctcatagcattttttgttaaacctgataaaatgttccatgtattatacacgcaactatgcgaatgacaaattaggattgacaatggcaagcacagaagaagacgtagcatattttaagcgactatttcgttatgaaggcggaacactgattcgcaaagttacaaccagtagtcgtgcattcgctggagactccgtagggtgcgagaacaacgttgggtatttacaggtaagcgtaaaaagcaaacccctatacgttcaccgaatcatttgggaaatgcataatgggcctatcccagaaggaatggagatagatcacatcaaccaggtcagaacagataacagaatcgaaaacctgcgactggtaagccaccaagtaaaccttaaaaaccaatcgatgaacagtggcaatactagcgggcacgctggcgtaagctggtttaagcgaggcggtaagtggagggcaacaataaaggttggcggaaggcaaatacacattggttacttcgcgtcgtttgagtcggcagttgccgcacgaaaagcagcagaaaaacaatatggttttcatgataaccacggagcagagaaaaagaaatgagcttatcgattgagcaacaaatagatctatacgcagacaaaatcccggcaatccaaaagagatttaccgttggaaatatcgttccgtatccatatcaggctgtggcttatattgagacagccaaaagaatagcaaactacaccgcaccgttttacattaaggcttcggtttccgccgggaaaaccatcatgatcgccatgctcgcagcgcagtgcaaggcaatgaacttacccatgatggttcttgctcgccaggccgagatcgtgaagcaggattccgaggagatcagtaacctcgacgttccaaactccgtttattgtgccgggttaggcacgaaggcggcatacttcccgatcgtcgtcggatctgaagggacggtggttaatggcctgtttaaaatgctgggcgactacgtgccttcagttctggctattgacgaatgccaccaggttgactggcaagatctggcggaagcgatcgccaacaatgaatcgttcgagtacatgagccgaccgaaggataagccgtatcgcgtgaacggggaactggtcgatgccgaccacccatacgacgaaaaattcgacgacgtagaattcggcggcggtcgcacgcagtacactatcgtcatttgtgagttaatgcggaggtgccttgagaagacagggcgagaacttcgcatcgttggctatactggttcggagtttcgcggcgtcattccgattttacaggaagacaagagccagcctggtttttggcgcgagcagatcaccgacattaacacaaactatcttgtcgagttcggatcggtggttccgacaatttttggtgatactgaatccgaagggttagggtatgacctatcagaattccacggttccagtcaggacggtacgcaggattttagcgcggaagaattgcgcaagatggaaaagaaaatccatgaatccggcgaaatgacgaagctgattatgcaaaaggtcgtggagcgtgcgaaaacccgaaacggagttctgataacttgcgctggacagcggcattgcaaggaggcggcgagctatctaccgccggacgcaacatacgcgatcatcaccgaaaagacgaactcaaagaaacgcggcgaaattttggataaggcgaatcgcggtgagatcaaatacatcttccaggtgatggccctaaccactggcgttaacgttccattttgggatttttctgtgatattgcgcaagatcgggtcgcttacgttgcttattcagcttttggggcgcggaatgcgacttctgaaggactggcaaaaacagccgccttactcgtgggtgaaagaagatcaccttgtctgggattttgccggaacaatggatgacctgggccagttgtatttcgatccgatcttggagcaggcgcaataccaaagacgcaagagcagcaagaacggcccgaaaatttgcccggtatgcaagggggaaaatagcgagtacgcccgcagatgcattcacaaagacagtaacggcaatcggtgcgaatacttctggatctcgcagaggtgcgaagaccagaaagacccgcgaacagggaagattaaaatcaaggggtgttacgctgaaaatgatattgttgcccgccaatgcagatgctgcggcgttcagcttaaagaccccaatgacaatctcaccgggaagcactatacgcagaatgactggtatgatgttgtctggttcgatatcggcttgactcgcaatcagtccgggatcatcttcaattacgtgttactgaaccatgacggcgagcgattcaccgcaagggaaaagttcttcccggaatcagagaatcagatttgcggcaagctgtggcggcaaaaggcagtcttccagcacgttagcgacgcggtaatgcgtggcaagttgggcggaatgaaaaacgcccgcaagatcctggagtatgcggaatacttccgcgcgccgaagcgcgtaacgcatcgcatcaacggcaagaaggaggacattatttcccgcaaagactttggaggcgaggagtgattacagacaaaggggattacctcgaatattacggcgggcctgtaaaggcttgcccacttgaaaaaatcgaccagatgaacagcgtttcgtggctgcgttacgaataccccgattatctgttctggcatacggttaacgagggtagcaagcacaaggcgagcgccgttgcagatcatcaaatgggattgcttaaaggcgtaagcgatatccttgtgctgattgggctgggcggaaaatacccgttcgccgccattgagctaaagcgccagggtaaatcccaggcatcgccagtgagcaaggagcaacgggaattcctcgccgccgtccgaagccgtggcgggttcgctgccgtggcctatggattcgagcagtttaagatcgcgtttgaagacgcaatcaaatagcactttttgttaaaactacccggcgcgagtcgggtattattctcccatcgaaacgaagaacggagtatttaaaatgaaaaagattattgctttaattgttctatctcttgttctcattggttgtagcgaaaaaccaaaaacatatatttgcggtaatgaatcgtttgaagttactagcgactatattaaggtggttcgcggtaatagcgctggcgttttaattgatggcattggtgaaaaccagtataagctggttacaccacttggaacggctttttatactgttaataaaaacaccattgatattaaagttagcgtttatcagaacactttaacttgcgaggttaagtaataatggcaaaagatatcacagacaaagacactcacgacgcgttcacgactttcgaacagcttgagcgtgaaacgttcataggcaacgcgcttgccactggcggacactatcaggccgtcaagcctgataaattctaccaggtaacgggcaaccgctacgccgggagcaagacgccggatatcgtccgcgacaagtggtcaaccgatcgcagccttattgcttacatggaggagcgttacgggccatacgacctggacgccgccgccgaagaaagcaacaccgtctgccctaagttttacgacgaaaagaccgattgcctcaagcgctggtgggggaaaaataagcacgtatggcttaatccgccttactcgttcccggatccctttgtgctgaaagccattgagcagatggagcatgacaaccagatcgatattttgcttcccggcgacaactctactgcgtggttccgcgacgcacagaaggcagcggctgagatcatttggattgtcgcagacgtcacggaggacgaagacggaacgcaactaagccgatccggtcgcctagccttcatcaacggcctaagcgggaaaccagtcgacaacaacaacaagggtagcgtgattttcatcatgcgcaaactcaagccgggcgaggagcaaaaaacgttctacgtcccggtaagcgaaatctgcccttcattaactaaaaagcgcatgcgcaaacgtgggatctgaaaaatggaacagcttgaatctttcaccgaatacctccacatcgtcgtcactctgctggacaagtacggcttcatcggtacggatgaagaaaagatggccttcgccgatagcatcgatggcacttatcaagaattcatggataacggcacgccgcttgctgactggcccgcgattcttgagcgcgaattgctggattttcgggcgcgtgaaggtgcggaatatttcgcgaaacagcactaattgttaaacaatgcccgccgcgagcgggtattattgttccatcaaccaatcaggagctaacgccatgaacaccaaaaccattgccgacaccatcaagatcgcacaagttaagccgcgcatcgtatctcgccacctgattaacctttctcgcctgtgcatggccgactacgtggcgaagcctttagagaatggccttgatggtgaaatcggtgcgatctacttccgcgccgcgcacggcatcgaagaaattcacatgtacgagcagatggcggaatgcttctgcatttacggtgacgaatgatgattgtagaatctggccgcgctgccgtatggcagcatgccaaagaggctggcattagtgacgatatcgtgatgatcgcaaagtatttcgatatcaaggatatctccattgtgttcaatgggaaatttacctatcttcatgagcgaccactgaagcgaacgcgtatagcggttgcgacgcgggcagaggccgacgcgctgaagatgttcattcacgaatctaagcagaccaaaaaatattacaagtagcgggagtgttgagaatgcgatatattgcgatcctgattacggcggtggttctcactatcgcaatcttcaactacgcaattcaattgggataaattatgcaacctaaaatcacagacgaagaatttttagccgcccgcgaggagggcaagacctaccgcgagatcgccgaagagttcggcatgaacgttcgcagtgttgagcgtcgcggcgttcgacttgcccgccaggggcatttgcacggtaacaatcacgtagcgaagcacatcccggacgggttcggggtcaaaggcacatcgaccatgattcgcgcgaacggtgatgaagttgtgcgctgggtcaagtcagaagtagaccgcgaccgcatgatcgctttgatggaggcggcgcaagcatcattctgcgaagacctacctcgcgctgaaccgcagcctaaggatgaatctaagttttttattgaggatcagctcgccctgtatccgatcttcgatttgcacatcggcgcgatggcccacaagcacgaatgcggcgagaactacgacaccagcacggcggaaagggttcttaaccgcttctttgactactccgtttcggttgccccgcagtcgaaaaagtcggtcttgctggtcggcggtgacttccttcacagtgacggcctggacgcagtaaccccggcaagtggtcacgttctcgatcaggatagccgttacgcgaaacttgtttatgtggctattcgctccttgcgccgagctgtgtcgctactgctgagtaatcacgaagaagtagaggtgcaggtaatcgaggggaaccacgatcaggctggcatgatctggttgcgtgcagcgctcgcagcgttctatgaaaatgagccgcgcgtattcgttgacgtcagccctgcaattatgcatcgtaccgtgtggggcaaaactatgctgggctacactcacggccacacgatgaagaaggcagaaacgcgcctcgccgcaatggctacagacttccgcaaggaatttggtcaatgcgactacatctacacgcattcgggccattggcatcaccagaccgtaacggagcactcgttagggattgacgaagtacacggccagttaggggccaaagacgcttacgccgctcgcggtggttggcgctcatatcgccaggcggcggttattctgtacagcaaagaatatggcgaagtaggccgctttatctaccgcccgaacatgtaaccacaacggccccgcgaggggccaacaaggaaaaccaatgaatagaaatatctgcattttcgatctcgatggcacgttgtccaatggcaaccaccgtttgcacctgctgccgaaaaaagatctccacctaaccgaaagctggacggcgttcaacatggcggctggcggcgacgctcccattacggacacgatccgggtaatggaggccatgcgcgcagcaggatttatcgtcatcatcctgaccgggcgaagtgatgaggcacgcgagatcactgaaaaatggctggtgcaaaatggcgcatcgcattacgacctgctgattatgcgctccgcctccgacaaccggaaagatacggttatcaaagaggaaattttacgcaagattggcattgagcgaatcgttgcagcgtgggatgatagccccactgttattgcgcacttccgtagcctgggtatcacaacttaccaggtctgcgactacggcgaaaaccttcacgaccatctgaaatctcatggagtagacaaatgaaaaatgtaatcatcctcaacggagcgccgggcatcggaaaagacaccatcgcggaaatcatcgcccgcaaatgggagtatcggatcctgagtttcaaatcaccgatgtttgacattgcgcgcgccatcctgggtgcaaccgactttgcccgcttcgccgtccgttaccacgaccgcagccggaaagaagtaaagtgcgactttttaggcgaccgctcgccgcgtgaattcctgattcacattagcgaaaatttcgtaaagccgacgttaggcaaaaagcagttcggcaagttgctttgcgattctgtcgtgaattcgcctgttagttgcgtcgtcagcgacggcggatttgacgaagaagtagagcacatcgcggcgcacgatagcgtaaacgtctttgtcgttcgcctgcatcgtgacggcatgactttcgagggtgatagccgcaagcatattagccgcccggatctgatttgcgaaacttatcacgaattcgattttgatatgacgactggcgagccggaagacgacgcgcaaaaaatccttgatatggttttcgaagggtattaatattctctacgtaatgcctttattatcaccgccttaaactttgggagccttaacaggttcccttttttttgttctttatttggcccaacgcatatatcatcgcattatcacttaactaacagaggttgcatatcatgcgtgaattcatcaacgcggcaaccaatggtagcggcggtgttaccctcgcaggctctgcgaccgggcaacttatcattgcggccattggtttatttttcatgattctattcggctcattcggcgcgtggttgcgctggcgagattcaaaggcgctgcgtgaagcgctggaagccggggatatcaaaacggcggtgaagatcaggagtaaataatatggggattaaaacgcgggttacattcgcagcggcgatggcgatcgctgtcgccttcctcccgaaagtggaggacacgaaatacaaggtttataccgatatcgctggcgtttcgacggtctgcgaaggcatcacagggccggacgtaatcaaggggaaaacctatacccggtcagagtgtgatgcacttttggagaagcacatccaggtcgcaaagcgtgtggttgacagcaaaatcaaagtggccgtgccggacaccttccgggcgtcgatgtacagcttcactttcaacgcgggcggtggcgcatactccggcagcactatgctgaagttgacgaaccaggggcggctatatgaggcgtgcgaacagctttaccgctggacgtactatcgcaacccgaagacgggcaagatggaaaaatcgcgcggcctgcataatcgccgggatcaggaattcaatctttgcattaaggatctaaaatgagtagcttaaattttcagcgagcattggcaatcggcttcatcgtgtgggcggtcgcactggtttccggttgtgcttccagcgtcccgatcctttccgatctggtgggcagcaagccggatatgacggcgcaagtcggtgcggagaacgtgaaacaggcggttggcgtgacgaacaaaacggacacgtccagcaagcaggaaacgaccttcaaagaatcggcagttggcaaggttgacacttccaacaaaaaggcggtgacgacctccagcattcacgcgaaccagattacggcggagaagatcgagatccgaaacgacggtagcggaagtgtgattccgtggctgattggtgcagttggtgccatcatgttcgctgtcggtgttttcggtatgtggcgggaacgaaaaaataaaggggcgtaagccccttttttcatatgtaccgtttgacgtgcagcagcgccacgccatcttcatcattcaacccatgttcaaccttgtttgtcgcggccatgccttgatatagcaaggtgagcgcggcacgcaagtaattttctggtgtgatctgattcacgcaaacaagcctgtgaacctccgttatcagatcttccacctgctttcccgaatagggcttcatcgtcgagttgctcaatgtgcatcatctcccacatgtatttgttttccatcccttcaaacgaccggaagttaaatccaatctccctgttatccgggccagtgcaccacaccacgccgttttttccgtccaggtatccattcgtatagcttcgcgctaaaaactccttagaaaccattgaggcgaacatacggtgtgacacgttggcagcttttgccatgcgtggcgattcgcggtgcatgtaaacgaacttcgcaaaatcttgccgggtaaattcccggcgagactcgcagaatcggtaaatgtcaaggataaacattcattacctcatgaacgaaggattaacgaacacttccgaatcaatcacgcagacgaaacctaattcctccatcttcggcagcaatttttccttaatccttttactcaccccggactgacctttgaagatcttcagattgcggcacgcgttatagatgctctgaacagtcatcacgcctttcgactgcttgcaacggctggcgataacatcgtacacggccttaatctccgcaccctcaccagcgaagccggacgaatcagccgacgacaaatacgttttgctcaactcatgaaacatgatgatggcttcgtcgatcgtttcggttccgatcttcttcgagcgcttgccgccaggttgccagttgcggatagtgtggattaccgacgccaggcgcatcacctgcttatcgaatttacccatcgcaccgcgcagcatcgtatgcgaatacttcccgccgtcgcctaattccggctctaactcctggcgggccttgttcagccgacgcatgcctgcttcagtcacttccagcttgatatacgattcagtcataatgtcatgaatgaggcggaagtaatcagcgcgtaaagacttgtcgatcggctcataggtcgaattccctttttcgtcaatgaacacacgctcacctaaccgcgtttgctcgcgaaccaaaaggaaacgctctgatacaccgataccgcgagaaccagcttgcatgatggcgtcgatggtttcatcctgggcgattacgcaaatacagcccagcgcgacgaatgacatattgttactgacgtcggaacgtgcgatcgatacgtggcccttatcccacgccttcaacaccagttcgctgttcgtcttcttgccgccgtcgttgccatacgtgatccctaacaggctgttaaccgccgtcgcttcgtccgagataaccgcaaagttgccttgccgattgttgattttcgccaggccttccggcgtggtatcggagacggggaaggtcagatcgcacatgctttctaacttctcctcaagttcgtctttgtcttcgaacagtttcgccatatcagactgcgataactcgcctttcatggcctgcttgttggcggacaacttcgccatgattttcttgcgctctttcttgcgcgcctcgttgattcgctcaacctctgcgacgatcggatcgatagccagcgagttaatcgcagacttaccagcggaaggcggctgcgacgtaatgacgtaaagcgtcgtcggttgctcgctgccgtggtactccacccaaaagcgacccatcatcgcggcggacacggttcctaggaaatgcatataagccgatgattccgggaattgaacggagcgagcggcattgagcgccagcttgccgacgatatcgtaatcattcgcgatcgagatcgtgggatacttgtccgcgtttacgtcgatatctttcggcttgggccagaaagaaacggagtcgcgatacccgttcgcacggatggcgacgcgcaaggggctgatgccttccttctctgcgatggcaataatatcttgtggggacacgcggtcatttaaaaacatgccttgctcctgattggttaatcgtgcggctaatgataagccgtcttaaatccgagatccagtgataatctaaacgcacttgcaaaatgtgcttaggttatcggggcgcatggccccgaatccgttacaggtatttcgcctcaaacgtggtgccgtccgacacgctgaaaccgacttcctcacggtagagcgtccagcggcaaccgtcacggtcgaagatgtatccggcgactccgcccagcgcacgaccgctttccacctggtaacgcttgccgacggtgaaggattttttcaccgggtttttgtggtcgaggccaacgcatttcagggttttcgttttcagctcgataaacgtcgccaccaccacgccgccgacgccagcaataaacaactcaccgctaatgccgaccgacaagcaaactcgcttcttcttcagttcggcactgttatataccatcattgacacgttgccttcgtcgtcaatgcgagcggaataaaggttgttttcctggatattaacagcactgcttgaggtgcatttaattttgattgactttgccattttatttcctgtctcccatttcgatatagaggtttaccagatccagaaagtcggatttgtttctgcaactcaatttaaagccaacgtgcgattcgatcttattttgcatcgctgccatcgttgcgccgccgttattcattttcaaaacttcgcggcatacatcggccagttttttagatatcatatttcaccaccgtaattttcgtgtttttgcaagcgtcttcgatatcgctgattaagcgcttcacccggatatcaatcattgttttgtggtgcatgacgtcaacaatcccgcaaacgcacaagatcatgattgcaaagaggaagccgcctgggcaagtcattgataatgcagttgctaacagcgcgataattaatttcattttgtttgcctcgttttgtttcgatggagtaactatacccgcaattaagcgggtacgtttagcaattcgtgctattcattaaaattagcctggaacacggcgcgagcgaatccgcgcggagtgatagaacgaagcatctttgttctttcagacttgccgccaaggaatttccacgcccaaaagaaatcgacgccttccacgccttcaggcggcaataaccgctttggctccacgaatccgttaccgtgccagatgcacgttttcttcgtgtaattgtcgcagtgcggcatttttgggtgccaaacttcctcatgcggcgcaacataccctccgaagtcgcgagggtggaaataaaaatccggcttgcgccaaagagtcgacaatttgccaaccgggttttctaccatccagggacaattatattggtcgcccaattgctcgatcatcttcgcatcatcggcggctgatagcacatcctgagtctgccgggcgtgcttcaccccgctatgcgctaacagcgtgcaggacgggaaagcgaaaataatgtcaggatccgggatgcccaggatcgtgcgcttcacgtcgaaatctttgtcaatccacatgttgacatactggattttggcatgctccatgcggattttgtactcgccgtggtcgccggaatcggcattgaagcaatacacatcgcaaccgcgaattgcccacggtagacccataatcccggaaccgtcaaacatgcaccacacaacgcgctttttcatcgtcacctcaccagaaagggatacattcgcggcaaccttcttcaccagtgcagccgcaactattttcttcttgctctgccagatcgtcacgcatcggcagactttcggcatccatatccatactgcccagggcatccgatagcgtcatttcctgattggctactttgatgcaatattcgcggttaagccctgcgtcctgggcggttaagaaacggtgccagtaggcatcgtcgtaattatcagccatttcttttcctccggttaaattctcgcaaactggcggcgcatgacttcgaacaggttttaccccagccacgtttaagatccgccgcctttaccttatagacggccccgcatcctggagcctcgcagcacttcatactttccttcgccccgatgtgatccggtcgaccagtcagggagctatcgccgggattcttcgtcgaccagaaaagttgcactgtcgcgacctcctcgccgaactcattaacgaacatgtaaacgcccttgcttttcagaagcacggtgcaatgatgcatttcgccgttgacttccaggtatgcgcgatcgccttctttcattagcttctccacgattcaatgaacatgctgttcgattccagcgtcagcgtgacgccagccagggaggacggaatcaggcgagcgcccggaaccgttccgacaacatagcgaccattcgatttggtaatcgtgatctgagtaaagccggattcgcggttcatgcggagaacgacgcggccatgtgcgttcagtacggcgagaatggaatcagtcttcggatggttcattgtgtaactccttcgtttgttggtgtggggacagtatgccactatccccaaattctgttttagcaattcgtgctattcgggaacgcaggtcgtgtaatcctggcagatgtagattgtgcgctgaacacgctgcgcggcatcctccaggctctgaatctcgatatcgttgctgtcgacccggcagggtgttgcaccgaagatgaaataccccgtctgcttgtcgttgatttgccacgccttgctttcgggaaccgtattgacgacaaacggcgtgtcgtcggctttgaagtcttcagggtgacgcccgtaatagtggatgattgcagcagttgccgccgccttaaacttttccgtcacgtcacgggcggcgatatcacgcgagatctggatatcaacatccggcgcgccgaccatgtaggtaaagctgttcgaaatggtaactgttctcatttatattttaacctcgtttcggtggatgaagtcggcgacatagtggcactcgatcgggttttcgatcccggcgagaacctcacagcgcccgttgttcagtaactggcaatgctggcaatcagacccgccaacattagctatgacgatggcgatcccgttgcatgaaccgccaaacattctgtgcgggaaggggtaagcctcgcaggtgcaaaccacctccccggccctccgctttctcatgcgctccccttctcgatgcagaagacccaatcgcgagcatcaaccgcgaagcgtgccacgccgtcgagcacgatgaaaacggtctgcccgttaacgccgcgacccttctcaatatcggtgacggtgcggaacaggtcgcttgcgccatattgaattttgtccccgattacgacgtcgccaaatgctttcatggttgatctcctgactggtttcgatgggttaactataccaggccttgcggcccggcgtttagcaattcgtgcttatttcactgctttcttcgctgccttgtacgcctctttgaaggccggaacatcttcgaccggaatccagaagccggatccataaccatcgtcatagcaagggcattggtcgcagtagtcgccccaggttttctcttcgccgccgacagagaatccagtggccattttgcataacgcttcctcaaccgcttcgatcttgtcggcgtcgctatccatgataacgaagttccacttgccgttatactcgctgcccaggttgattgattcgcgttgaagtttcatagctttagctcctttggctcaattcgtttcgttgaagtaatcatagcaaagtcgatcggatggcttttaacaaaaaatgctattcctgcgattgctgattattccaccgattcggaatagtggaatagatggtgattgcatttgattcactggtgattacttttgacgaatcatgattgcttgtgattgtttcattctgtgcaattacttggggaagtgtttcatgatttgcaacgaattgcataaatgtatgcaccatgcacgcaatttgccgatcgaagctggcaaaacgtcgagttgtgtttcgccaacatttacgtcgtgtgggagtgtgggggcggaatcatcttacctaaaaattgcgcaaaaaatgaccaatataagcccatatatagatagtaagtatatgataaataataatattattattattactctttatctttatatatgtttggtaagatttctccggggaggttatggattcctcttgcgcaagccataatttttagatgttccgccgcgaaaaaatgtatatagggatatataggggatgacagcaaatcttaccaaacacgccgaaaccctttgacggcaaggcctgcggcctgtattatcaccttccgaaacattaccaaacgccgtaaatgtgggggaaacacaaatgcaatacaaaggctatgagttcgaagaagtcgacgtgtccgagtggatgcggtacgacgcagaaaagcaagccgcttaccatgaatggctgcaatccataacgtttggcgacgccaccaggccagccggacggagccaggaagcagcgaagccggaaggcacattcactggtaatcgttcgtccgagatccggcgcatgttcctggatggcgggcggcgtatccagatgacggcggaggagttcgtggagaagttcggcgttaatccggtcgacaaccatttccgcaggccgttgctgaaactcctggagccgggcgaggtgttgcgggtgagcctgggggcggggttaatctccgtctttaccgagttcgacgcaatgactggctcacacctggaagccgaggcatacaggcggcagggcgctatctctgagcgggaaagaatacttgccatcattgacgaagtgatgccaggaggcatcatgctaaaaggctataagctggcactaatcgcaaaaatcacaggagcacgataatgaaactatatccagaccaaaacgacccggcggcaccgatgcacctgggcgacacgccaatcgacgagcaggaggttatcgcagccattgccagggcatcggacgacgaaaatccaaccgccatggaatgcgtgacagccgacctgctgttaatgtcatttcttccgggatctgaatcttacattcagcacatcaccgagacgggccaggcagtgacgaagccggaattcatcggagcgtctaacgtcctggcgatgatggccgatgaggccgacaacatcattagcctggattatccacaatgagcgcctttatcctgttttccatcggtgttaattgcggattgctcctggcggcatttatcatccacctgagcaacaagtagcactttttgttaaaacccggtcagagcgatcgggtattatctcttcatcgacaacgaaccgaggaaagcgaaatgattactctgatcacctgggaacacgaaaacagcaagccagaagtgcgcgagttcgagaccgtggcggcgtgctacaacttggcggcaaacggtggcttttacaaggcgcagatcgttaacgagttcggggttgttgattatgaattttaaggcgagcgacgtaaaacctggtgtagtctacggatcgcgcctcaataaccgcctttggcgctgggacggcgaaactatgtggactaaaggcgagggcgatgttatatggcatgaatgcggctggcctcatcccacaatgagccgcctggatatcgcttattatctttcggtcggcgatatgcacgaggtcgaagatagcactttttgttaaaacgccgcccgcgagatccggtattatttattcatcgacaacaaagaggagatgaaaatgagcaagaagaatccatattcaaccagcaactaccataacgaacacgtcatgcgctggcactggcagaaactcaaagagcgctaccttgcacgccagggcaaataatcacaatagcgccgcttcggtggcgctgcatccccaccaccagcacggcaaacgccatgaggaatggccatgccacgattttcagcaacaaccaaacttcgcaccttcgccgggatgccgatcccacactcatcaaccaaagccgtccagggcagcgagcacggcgtatacttccactggcagggcaagtggcgtttcaccgtcattcgcggcttttacgtgacctgcgatcgcgtggatatcgagaaccattccggcgggaacaaggttcacgagttcaaaaagcacgaatagcactttttgctaaaactcgatcgggtcaatgcggtattattaccccatcaaaacagaggagcaaaaacatgattggcaaccacaacaacgaactgaacgcagcagaccaccgtcgcgccgtcgagcagaacttcaactcgcttaaagtagcctgcaatgagatgaaagcactgcttgaactgccgtcatgggatccacaactcgaagactactatgacggcctccgcgccaaacgtgacggtatcatcaaccgcctgcgcctggccgggatgttcctgtaaggagaacgcaatgattcacgaaattaagtctggcaagcaagtagtggcgaccataacgcagcgccacgttgtagccttccagattaacatccctggcaccttcgatatgcagtcgcttgacgtgccagtttgggccaacacagttgccattgatgccgacggctcgatttgggcctacgagtcgaccgccgaagatgtttgcatcccggactactcgcgcaaatcctgggttgattgcgggccttccgaaaacaagatgaggtcaattggggagatggattgcttccctgattgggagaaatcgaagattgacattcgcggtctgaaatagcacgcattgctaaacgcccagtcagaggaacgggcataatagccacataccaaacaacggagatttaccatgaagcagatcgtcaaaaacgcagttgtcgccatagtcggaaccaacttcgaaggcaagaaaagccgcattcaccttttgcacgttggcaatgatggcaaaattcgcggagctttccattacggcgagcgcggggagcaccttcacagtgacttgcattccgttatccagctaaccactttcaacgaatggcgaacccatcgggaatggctgccggaataccattacgagggtttgattgtcgaatagttcgttgccgacccaacgaaacttaccgcccgcgactataagcgcatggcacgcaaggcgcacaaactaatgaaacgcacgccagaagatcacgtctggcatgttttcgcaaatcagctttgaggtggctggatgatacgtttatcagacttcgatcgccactgcttaacagggcaattcggcgaaaagccagtaatgtgcaagatctcgaaggttaagggcgagccgtttgagcaaatcagaacgcttataagttttgccagacgaaaccgcctttacatccaggcacgcggcggactgttcgcaaagcaggttcattttgcgtatggaacagggttctacactggcggagacggtgttgacctatcgcctaaaagggttaggctgcgtgagataatcgaacgcggctacgtttggactaacgggatctactaatggaaacggtaaaagtaatttgcacgcacgctggctattcgccgctatcaacctatttcacacctggccgcgagtatgacgccaggttcggccctggccttgatgaagtgtggattttgcaggacgaccagggaaccactgaggacgaagaattttggcccgcctgccgtatgccggacgaaaagatcgccatgtacgccaataggccatacgaaaacaacgttttgtttgaggtgaaagtatgaaagtaagcaaaaagaaactcgcgctgtattgggccttcttcctggctggcctggccctgcatgacagcgtgggctggcagactatcggaatgctgtgcatgattattggcgtatgccgcctgtcggagattaacggattccgccggggatatcgggcagcattcagcggcgaaaaagaatagcactttttgttaaaactgccgtaacgtcatttgataaagtggcgttactgaagtgaacaatccaatcaggagcaacgcaatgaacgataatttaatcgcactgctggaagaactgaattcctacggctgcgcatacatcgagctttcgagcgagcaggttattgaagtcgcaatcgacgatgacgccgggtttaccagattaagggtggcggcaggggccgaagaggaattcgaagactgcggcatccgtgaagtaacaaaccttctcgaataccaccaggtgaaggagatccgctaatgaacaccgtcaaacttatggttgtcaatgcggcccgcgagcgtgagcgccaccttatcggctgcgtattcgatgccgtcgaggtgcacgaaccgctaggcacagtgcacgtaatccagggcggatacctgaacgaattcatcgtcaacccgctggacaccgacgaagatttgaccatccgtgttggtagcgagccggaaaacgcgcttttccacctgcggaaagtatcgaaggcgtcgcagcgcaagttgctggttcgcgcactgaagcgcattgcgaaggagcgcggttacaccgacgcatacatccgcaagttcggcacgttcgctggcgtaggcgattgggcgcggtcatgggccgacttttatttcaacaaatccggcgaattctgttccgtgcatacggactggctgcatggcacagaacacgatcccgtaaacggccacgagtggtacgaattcattgaggcggaattagacgccctttgatagcacgaattgctaaaacgaaagtccggggatggtgcatactatccccacactaacgaacaaaggaaattacccatgaacagcatgaaaattaacctgatcccgtccgacaacttcaccaaagacgacgacccgctgttagccgccgttattcgcgccgggatcggctgggcgcttagtgatgcctcgtgcgaatcatttatgcgtgaaccgttctcacgaatcgcggagcttgaaaagcaggttgctttcctgactggtgaacttcaggcggctatcgccacgatcgagaaggttcgggaaatcatgcgcaccgaacctggctatgacgttgaagatcacgcgcgagttttgcgcatgatggccgacgctttcgcaaagctccagcaatagcacgaaccacaaacacgaatcgtggttgctacatgtcaaccccatcaaagataaggaaaaacatcatgatttacgcaattattgccctggtggttcttattatggccctgtatgcgtgcggctgcttcctcatgcgggccttcctgaaatctgcggattctaccgacaaagaagatctttatcctgtgctttgctggccctggattacactttccgccgttggcagcgtgatcatttcccgcaattttaagtggtgaggcgatacatgaacatcaaaatgtggttcaacggatttacctacaacgtgcgctttcgcgggaagttctattactggtgtgatgagggcggcaagcgctggcggattcgcccacaccagaaaggcgcgagttatgagttaggcattgccgaggcgcaggggcgcgtcgagtgggttaagctgaaagtcatggatggcctgccaaatagcacgaattgctaaaaccgatcaggggtaagctggtatagttaccccatcgaaacgaaacggagttacagcaatgaaaatcaaaataaccaaaatcaacactcttaatggcgacggctcaattaccctggaagaatgcggcctcaaaatcggcgaagttcttgaggtcgacggccacttcaacgacggctcctactgtgtgattgctccgcgcaatagcgagtttatccaggctggtgacaatatcagcgtgagcgaagatgaatgcgaggttgtggaagaatgagcaacaaaatttgggttctaacctacaccattggaaccaacgaggggcgcaaatcgcgccgcctcatctgcgacaccaaagagcgggcgattaggcagcaaaccgttcttggtggcgaggttgtcgagtatctccgcaagcctgaagcgttcaaggtgaactggccggaaggcatggatatcaacggcgctttagcgagcctgcgtgagatgcagcacaacccgaagacgtggagcgaccttcaatgcctgcgggcagagccggaagtgaaggccgacccgttcaccaatattcgggcgcagcacgcggaatggtcggatcgccagttcggtaacgttgggccagttgggccgctcaagcacctggcgaaagaggcgatcgaggccgccgaagcgccggatgacattagcgagttcgccgatatcatcatgttggtatgggacgcaacgcgccgcgccggattcagtgatgagcagttggctgaagcggtggcggaaaagctggaacggaacaagcgtcgggcgtggggcgaggtcaaagatggcgagccttgccaccacgtgaaaaattaacgaaatcgaataccgtttaaagcgcctgtaagccattctggcgggcgcaaatttaaggagtgcgattgtatgcctgaatactcaaaagtcgaagatatgccgattggcgcaacgattacgggtatccgtatgagtgagtcggtcgacacaatcgagccgctggcgttcccggttacgcaggtggagacggacagcagaaaagggttcatcttcatctacaaaaatttcaatagtccgctgcgtgttgaagtgttcattgctcgcggaacctgggtagaatgggagaaggacaaatgttcggactgaatgaagcgcagtacaacgctgtgaagcgcatagcaaagcagatggccgcagaaacaaaagacgccatcaagaaggacaagaagacctacgatcaggtcgccgcgaagatgatcgataaacattgggcgcaaatcaacacgctggttactcgcggccagtttatctggatagctggctacctggaaggccgattcggtcgcagggatggcgagtatgaataaaaaacaggcaaacgaatcagcgacctattgacgtcctcgcgctgaccgggtaacttgaaccacgtagacacaagaggcggtaaacatccgcaagtctggccccgctttggggcatttacaaaaggggttgtgatgcagtacaagatcatgctcacagcaagaaaaatgggcggcttttgcaagtcctgcattcaagagtttagcatgacgattgaggcgaacgacaccgccgacgcggtggagaaagcaaaaaagcaatccggcgttaatctggatacgcataaaatcaacataaactacataagggaagtcaatcaatgttaactctgattattgcactgttaatgctgttcataggctatcatgttggcgcggctcatcttgtcgagcgcctttctaagcgggtacatgaaggcacgtttgctgccatgatgtacaataagaaaactgcacgttgggaaaaaattggcgatccggatggtatcgcaaagcgcataacgttttcgccgcttccgtatgttgactgcgagcctttcgtgaaactacagaagacgcttaatcggcgaaacaaactgatatgatacaacgacccgcttcggcgggtttttttatgcctgcaatctggtatactcgcaactcaacaaagaaggagggctaaaa

SEQ ID NO: 255 - DNA, 49150 bp, synthetic construct
  source 1..49150: mol_type = other DNA
atgtctgaagaacgtagaaagcgcgtaacgaaatcgcactttgagggaaacttcaaagcgctatatgaaaaggaatttggcgtcgtgctggggcgcacggcagaaatgacgccagaacaattttttgatatcgcaaagcgttacttccagtgggccgaagagaacgcaatcaaggcggcggaaacggcaacattccagggcgacgttaacgagtggggagtgaacaagcctcgcattttcacgatcacagggttaagcctgttttgcggcgtgaaccagtcaacgcttgggcgctatcgccacgacccgaactatgcgccagttatggagtttatcgactccgtaatctatgagcaaaaattccagcttgctgccgtcggcatgattaacgcttctttcgtcggtaaagagatggggatcgataagccgccagtgctgaacatcgacgctatcgccggggataagaacgagatcaccgaagagaaattagagaaagccgtgaccaatattcttgataagctgtaagggtaggctatgaacgaaatgatcatttgggaagacctgtcgccagccgataagctggcaattaaggcactgagtacgcgaaacttttcgctattcctgaaaatctggttccagatcattcagggcgaaaagctaatgtggaactggcatcactcctacttttgccacacggttgatgaaattatcgccgggaagcgcaagagcacgatcgttaacgttgcgccaggctccacaaagacggaggtgttttcaatccacctcgcgccgtatgcgtatctcaagtgccggaaggttcgaaaccttcagatctcgcagggtgacgccctgtcaaaaggcaactcggatcgcgtgattaagatcttctcatcaagcgagtggcaggagctatggccatcaaagttcgggcgcaagcagatcgatgaatttcaggtcatggacgataacgaccgcgtaaggcttgaaatggtctcccgttcgtccggcggccaaatcgtcggtaagcgtggcgggtacatgacgccgggattcagcggccttatcgcgctggatgatatcgacaaacccgatgacatgttctcgaaggtgaagcgtgagaaaaaccacgtactactgaaaaacaccattcgatcccgtcgagcgaagaagaagaagggcgacgaaacgccaatcctttccgtgcagcagcgattgcacgcgcaggatgccacctggttcatgatgagcggagggatggccatcgacttcgatcgcattgttattccggcgatggttacgcgggaatatggcgaatcgcttcctgactggttgcgtcctgagttcgaacgcgacgtgctttccggcccgtcggtggttattgacggcgtagaatactggtcattttgggaggacaacgaatcgatcgagaaccttgttgccttgcgcgaggccgatctttatacgttcctttcgcagtatcagcaggagccaatcgccctgggtggcaacgtgttcaagtcggagtggtggcgctattacggcgattccgacaaggcgcacgagccacgcccggacaagttcgaatatacgttcatcacggcggacaccgcgcagaaggtcaaggagctaaacgactactctgtaatgtgctattggggcaagtatcgggatcgcgtctacttcattgacggaattcgcggcaagtgggaagcgccagatctccgcgttcaggccgaagcattcatcaagcagtgctggcgtcggaacaaggagtgtgggaaccttcgccggatctacatcgaagacaaggcgagcggtacaggtctaatccaggatttaacaaaggcggtaaacggcatgggcgagatcgtcccggtgcagcgcgataaagataaggtcactcgcgctatggatgcacaaccaatcatcaagggggggcgtgtcgtgctgccggacaatcacccattcgttgcagagcttgaggcggagatgagcgcgtttacatatgacgattctcatccacacgatgatatttgcgacaacgtgtttgacgccgcaaacctggaaatgaacctgagcgacgatccggtagagcgaatgaaacgccttgcgggattgaaaaagctgggtcgctaatacataatgtgggcctgacggcccacacttaaacaaggttgaaatatgaataacattaagatggacgactataatcaaatctttaatggtggcgctggttatgcgtcaaccctcgcgtctatcgcggcaagatttggaacaatgtcgcaggttgaagagttctatcatgaaaacggcatggcgaagaaaatcgttgacgtgatcccggaagagatggtggctcccggcttccagctaaacggcatttcagataacaccaagtttcaatcagaatgggacgggttaaatctggagccgcaaatcaccgatgccctttgctgggcgcggctgtatggtggctcctacgtcctggcgatggttaacgatggtcgcgcattgacttcagcagcgaagcggggtaagccgctcgaatcgatcgttgtttacgaccacgattccgtttccgtcgcagaggaggaaaccagcccgcgaagcccacgattcggaaagcctaaaatgtacgaggtgaagccgctaaacggcgggcaaccgttcaaggtgcactatacccgtatgcactacatcgacggcgagcgagtaaccaacaaggtgcgcaagctaaataatggcgctggcggttcggtgctgaacaagtcaatcattgaagctattcttgactacgactattcggaatatctggcaacgcagctactgaagcgcaagcagcagggcgtttggaaggcgaaaggcctggcgctaatctgcgacgacaaagaaggcgagtacgccgcccgtttgcgcatggcgcaggttgacgctaattcaggcgtcggcaacacgatcggcattgatgctgacgacgaagaatacaccgtgattaactctgatatttcaggcatcccggaattcttgtccgctaaaatggatcggattgtcgccctgtcaggcattcacgagatcgtgctaaaaaacaaaaacactggtggcgtaagcgcaagccagaacacggcgctacagacgttctacaaactggttgaccgcaagcgcaatgacgattacaagccgctgttagaattcctgttacagttcatcgtaacggaggaggaatacagcgtcgagttcgaaccgttgtcgctgcctaccgatgcggagaaagcggatatcttccagaagaacgccaacgcggctcgcggcctcgttaccgaccaggttattgacgccaacgaagcgcgtgatactctgtcggcgttaattcctgaactgaagctaaaaggcaacgctccgaagcagaaaaaacttccggatcgcgccgctggttcaggcagcacgcaaagcgcagagatcttaaacaacacggaggcggatgatgaaagttaacggcagaatcccaaactggcgttatcctgaagcaagcgagcgggatttatcccgctccatgcaggacgcggtgacagaactcgtggtagaaatgcgggatcgcttagaccgcctgaaatttgacgccacggcggaggagatcagccaggcagaagacgatatcagcgaatcggccatcgtgttcttttccgccgtaattgcggcgctttcctccattgggttgactatctatagattcaattctaaacagtggcttgcaattgcgattgcggctggcgggcggaacaacgaatcagttatgcgccttaaagaattcggcgctggcgggtatgaagactggtatcaagattcgttgaggaagtgggaagataccgccgaagcgtcgatcaggaagttagcaagcgatatcgttgctgactggacgacgaaagttagaaccgccaacaacattggcaagtctcgccagcagatcgatgaaatcatcgaagggcgctacgcgatttatggtagctggtcgcgcaaccgggcaagcggaatcatcggaacttttaacagtatgttgatgatgcagcgcctaaaagatgctaaagtgtcgcattacttttggttcggcatgatggatgaccgcgagcgcgaaagccatatcaagctagaaggtaagcgacgccctgttaatggtgatggcattttccccggcgaggagtacggttgccgttgctgggcggttccgtcatttgataatgaggatgattgatggttaactttaatgattactttaatcacgtaggaaaggatctgatatggaagcgagcaacatcaaaccgagtaaaagttggtgatgttgccgggtggaaagatgagcatgggtatgtatacattagattcatgggcaaactgcgacaagctcaccggatcatttgggaaatgcaccacggcacaatacccgaaggaatggaaatcgatcatattaaccatgtaacggacgataacaggatcgagaatttaaggcttgtaaccagaaaggaaaactgtaaaaacgtatcaatgagcgtaacaaacaagagtggagttgtcggcgtgagttggtgcaagagaacaggtaaatggtttgcatccataagggttgataaaaaagagcgattcttaggtagatacgaagacaaaaacgaagccatttcagcaagagaggcggcagaggtaaaatacaatttccataaaaatcacggagataaaaaatgaaaagagttcaaaggttcgacacggtaaagatgaaggcccgatttgatgagaatggctttctggttgacactccgattgtggcgcgtatcggtgcgcaaacgtaccagacgccaaccgggccgcgagtcgagttccgcccgcgttctgaggtgtttgatgctgaatcgctggcttcataccagggaaagccgatcactttgggtcacaagatggttaacgcgcagaatgcgaaaggcctggttgttggctcgtgttccggcgctggcaaagaagaagggatcggggttctcgttccggtaatgatttacgacggcgaggcaatcgagcaagcgaagaagcgcgttgccgctgaattgtcggttggttacacttcggcagatatcgatcgtaagggttggggaaacaacgccactggcgaatatcacttcgatgatgaactaccggaaaacttcgaagagatgaaaaatgattccgtctctgattgggttcgctttgatgcggtgcaaacgaagattcgcgtgaatcacgtcgcgcttgttttccgtgggcgagcagggattgcgaaattaaatcttgatagcgaacaagaattcccctatgatgacgactcaaaccacaaaggagctaaaacaatgatcattaaaattgacggcgtagatgttgaagtggccgataacgtaggcgcttacattgccaaactagacgcgcaagttgcatcggcaaccagtcaggtaacgagcatcaccgcagagcgcgacgcacttcaaaccaaagttgatggcattgaagatgaagttgccgcccgcgttgctaaaatcaaagccgacgaagacgcaaaacagaaagttatcgcagttgtttctgccgctggcgtcaagtgtgacggcctggatgttaaggcaatgaaagttgcttacatcaaagaggtagacggtcgtgatctgtctgacaaagaagattcgtacatcgacgcttcttttgactttatcgccaactctgataagatggctggcaatcgctccaaagtcttcggcaaaaaagaagatggcgagcaaaaagacaaaggcggcttaccgaaacttgacggcaccgaaatcatcgatccgcaggcaaaattccgccgctaataatttgcggccttcgggccgctaccagaccaaataaacaggagattcaaaatggcacagattccagcttcttattcccgcaagcgtgatattgctgtagcggggcagatcgctgatacgtcactttacaatatcgacggaacttgtgttgctgaaggcgatatcaaagctggcgtactggtggcttccactggcgcagtttccaatggccacaaggtagttaaaccagcaaccgcagcgagcgacgtcattgtaggcatctcgcagttctcgcaagcctactcgcctgaaggcaagtatgacgatgagagcgcagttaacgttatgactcatggccgcatttgggcgatcgctgacgcaactgttactgaagaagattgcgcgttcggttctttcgtcacctttaccgcaaacggcacagtagcgaagggtgatgccggggttatcaaaactggctacaaacacactggcgaatacaccaaaaacgcagatggcactgttctggtgaaagtgcaggtgctttagggcgctgtagctccagcggctacaactggcgacgctggcgtataaaataaggggcttcggccccatttttgcaccagaaaaaaacctttgacggcttaacgattcgtgatattcttcatctcgttaagctaaatacacaaacaggagttttcagatgactatgaaattagatgcattcgaacagagtgccattaaggtcgcaatgcagggcatgggcattgatgccgcaaaactggatgcttacggtatctggactgttaagcagatgactcaattactgaatcgccagtatgagcaggcatacccgcagaccagcgcacttgagcttttcccggtaactaccgagatctcgccgaccgcccgccgctttgagtggctcgaattcgatggcgtaacttctgcgaaaattatcgccgattacaccgacgacctgccgaccgttgaagcgatggcgaaagagaagtcagggaaagttttccgcctgggtaacgcgtggtttatttccatcgacgaaattaaaactggcgcggcgctgggttccagcctgagcgatcgcaaggcaactctggcccgcgaaggtcatgagacgctcgttaatgatctggtgttcaaaggatccgctcctcacggcatcgttagcgttttcgaccatccgaacattaaccgcatgaccgccagcgcggcttggggcgatgacgcagcagcggctgaaaaggcattcgaagatctggaagacctgctaaacatgatcgaagaaactacgctgggccgccatcacgcgaccaacatcgtgattcctccgtctaagcgtcgtcttctgacgaaaaagatgcctgacactagcggcgactcttatctgacctggttcaccaagaaccacccgaacatcaccattacggcgatggcggagctggaagatattgacggcgcaggcaccaaaggcgtgctggcatacgaaaaagacccaatgaacatgagcatcgagatccctgagcggttcaacatgctgccgatgcagccgaaagacctgcatttcaaagttccgtgcacctccaaatgcactggtctcatcgtgtaccgcccgctgactattgcgattctcaccgggatttaatcaaaagcgccttcgggcgcttttttattgcattgcattctgcaatgtgctttaatttgaaacctaaagtaaaccaatggagcattaacaatggccagtaaaaaagaaaccgtagaaaccgtagaaaccgtcgaaaccgtagaaaccaccagtgccgaacaggcgtcgcaggttgttcaactacaaaacgttggtgcatgtgcaattcgctataaaggcaaaaattacgtctatgagcaggtttttgaagtgccggaaaacgaaatcgaccgattccgccacgaaatcttcaaaggccgggtcgaattctacgacaatccgaaacgcacgcgcgaatacatcgcagcggtgaaggcgaaagcgaaagagatcgtgcagcctaaaagcgcggaataacaaaaactaacaaagggcgcttcggcgtcctttttcatatcaggagagcgaccatgaattacacaattcaagatgtgatcgataaaatgcgcagccttgcacctccgcttaaagaagttccagatgaactgctgtctgcgtgggttgtgcttgccgaagagttcgtttgcaaatccaggttcggggattccatcgttacggcgatcgcattgatgaccatgcacctaatgtttttggatggagcgatgaagcaggaaggcgaaagcctggaatcttacacgcagcgagtggcatcgttcaccctgaccggggagttttcccaaaccttcgatcgcgtatcggcgtcaagcgacaacgaaatgctttctacgccgtggggcaaaatgtactggcgtatgctcaaaatgcgaggcggtggcttcggcctccttaccgccgggaacgtgcgccgctgcggaattggtaggtgatcgctatgaactacaaacaaatccaggcacgcgcaagcgcgggcattaagtttttcagtgacgctgacggcgtattcaacaagtacacgaaaggcgctggcggcggaatcgatccggaaaccggggaagatatcattcctggcgaggtggtaacgacaatcaagggcgcgatcagggatgtaaattaccgtgacattaacggcgaaaccatcctcgctggcgataagcgcgggtttttcactcatgatgtgccaatcatggagggtgacgaaatcgaagtagacggcgagcgctaccgcgtggttaatgcccgtccggtaaaaccaacgggaaccgttgttgcttaccgtccagttttgcgcagggtggcgacttatggctaattacacgatccgggagttcacaggggcaattgatgcatggtgtaaggccgctggtgatgcgctggaggacgttgtaaggtttacgtgtgaagatattcaccgcgacctcgtaatgcgttctccggtggatacagggcgcttccgtggtaactggcaaatcacctttaaccgcgccccgctttacgcgattaacgcatatgaccaaactggcgaaaagacaatccagaacggcaaagccaacattgcactatacgcaaaaggggctgggatcacttcgatctggttcagtaacatgctaatctatgcgaacgcgctggaatacggccattcaaagcaggctcccaatggtgttatgggagttgttgcgatccggttgggcgtttatgttactgaggcaatcaagcgagcgagggcgaaaaatgcattatgagatggcgttaaaatgcaaggcggcagtggctaaatttgccgccgagaacgggttaatggtcgcaggagataacgttgactttaagccaccaaaacacggtgaaacttatctcaagttctcctacgtagaagcggattccagatctgtcagcctttccagaacttgccgcgtttatctggctatggtgcagattgacgttgttttcaaacccgggatcggaaccgacgccgcgcggctaatcgcgcaaaacgttgcaaaatccttccccgaaggcaaggttgttgattctgaaagtaagttatatgtgagcgagtgggcggaagtgtaccgcgttcagaaacacgaaacaggctggctcctacccgttcgcttcacagtaagatgcgaaagcgcggaggagagcggttatccatcaacatgactggtcttagaggtgcttataatttcttgccagcctgtaaatatataggcataatggcgttgttaaactttcatcaaaacaggagtattcaacatgcatttaccaaacggtgcaaaggtcttctttgagaaggctcgcggtgcggccattccgtttaccgcaatgaccaacgacgcgaaaaacccaaaaatcacagtggcggacggcaagctgaaggtgaaagatattgtgatcttcaccgattgcacctggggcgacttcgttaacaaggtggctcgcgtaaaagcagtgacagcaggtgtggcaacgctggaagagttcgatacctccgacactaacaagtatccgggcggcgcggccactggtaacgtgagcgtgatcactgattgggtcgaattgccttgcattcaggatttaggcaaagacggcaacgaacagcagttctataactatcagtgccttggcgatgagcgcgagcaatcagaacctacttacaagtcggcggtgacgcttaactacacgtttgcgcacgattacagtaacgcgatctaccctgtgttgcgttcagccgacgccagcaagcaggcgagagcgatgtacatgtatatcccgcgagcttccgaggttcgttactggtctggaattgcatctttcgatgacattccttccacggctgttaacgagatggaaacggtaacgcttaacattgcgcttaaaggtgctcacgtcttccttccggttgtcgtgtaattaaatggcggggcttgtgcctcgcctttttttgtgcataatagcgaataacacaaaccaatcaggagttaacaaaatggctaaattcaaaattcaaattggcggcaacctcccttctttcaaactgcccgtaaccttcacttgcccggatggcaaagaagcgaccatcaccatgaccgtaaaacatcgctccaccgatgagatgaaagacttttatgagagcgaagataaagcgccaaagggtaacgccgagtttatccgctttatggccgaaggctgggatcttgatgatgagttcaacgacgaaaacatttcctggctttgcgctcacttcccggcgttcgtcatggcactgccacaaacttacatggccgcgcttgcgggccaccgtgcaaaagtttaaggcgggctgtttatctcacgcttcagcctgagctaaccgatcgccagcttgccgagtacgggttaaggcgatcggattatgaggcagatcttgaaacgatctactttgatgaacagaccgcccaaagctggcagctattccaggccatgcaaacgcagtggcgcattgggatgaacggcccaacggggcttgactataatacattgcctatgttcttcgaattgtataaaatcgacaatcgagaagcggcattacttgacttgcaaatccttgagggtgaatatctgaaggagatttacaagaaatcaaaataagcgcctacgggcgcttttttcatatgggggctaaacatggctgataaagtagctgggttgacgtttggcgttgacgtttcgcaggttgataaagcggtacgatcactagcagaactgaaaaaccaaagccagcaaacaggcgctggcctacagtcacttgcggacgctgaaaggcgggccacggcgcagaccgaggaaatgaaccgcgcgttgcagcgccagaagcaagagactgacaaatcaaaaaccagctttagcaggatcgcaagcgccatcgatccaacgatcgcaaaaatggccaacttgcgcaaagcgacggaagaacttgataaagcgtgggcgctgggtcttgttccggacaaggaatttttccgccttggcgctatcatcgagtctaccaccaaccaactccggcggcagcaggcggcgctaaccgaagaaggtcgcgcagcaatcgcagaggcggaggcaaagcagaaggcggcaaacgccgggcgtgattttgtcgccagtctgaaacagcaggctgactccatcgggaaaacacgcgccgaactgctggaaatgaaggcggcgcaattgggtgtatctgcggaagcggccccgttcattaatgccctgaagcagcaagagcaggcgttaaagaaacagcagaatgcgatgggcctggctggcatttctgccgggcaatataaaatggccatgcgccagttaccgatgcagatcacggatattgtaacttcccttgcgtcaggtatgccaatctggctggttgcggtgcagcagggcgggcaaatcaaggacagcttcggcggcttgagcaatacgtttaaggtattgttgagctacattaacccgctaacggttggtgctgcgtcgttgggtatcgccctggcggcaatcgctaaagctggttatgactcctggaaagcgcaacgagaactggcgaatgcgctggtgctgactggtggctatgctgcgaccaccaccgggcagatcacagccttaaccgaagagattaacaaaaactcatcggctacgattggcagcattcaggaaatcgcaacatcgctcgccagttctggtaagtacacaatcaaccagattaagcagatcacgaagactacggcggaatggtcggcgcagacgggtgagagcgagaagacgatcacagggtattttgattcgatcgcaaaagaccctgttaaggggcttgccgatctcaatgagcagtttaatttcctgaaagagggccagctaacctacatcgaatctttgcgtaaaaccaaaggcgagacggcagcagcagaggcggctacaaaactgtttgctgatactatggataagcgccttaaagatatcgcggacagcgcaacgccactcgaaacgatgtggacggatatcaaaaaatgggccgctgactcatggaaatgggtaggcgatcacacggtaggggcgctaaaccttatcgttgatacggtttccgcgatcattaacacgatcaggaagctgattgccgacggcgacgccatgatcgcgcagttcatcgttgacgctggccggaagctgcaaaaaattccaggaatgggcgactttggcaatgaatttctggcgcagcaggagcagctaatcaaggactcgaaagcgaaatccgacacgcttgcaaaaaccattgcggaacagcaggcaaggatcgcaaaaggcgaaatgggttacattgatgccgcgaaggataaaaccctttccggtgggtacagcagcaaaacgaaggatcgcgtaaatcaggaagaaaaagatatcctgaaaaaccgcaacgccaggaagcagcaggtagacgcgggcgttaaaattgatgagcagtatcaggctgaactgctatcgctacaggcgcagctaaaggttttgcagcagcacaaagggcttgacgacaagatcagccagcagcgcaaagactacttcgagacggttgctaaattccaggttttggaagaggcaagccagaagcgaaaactgacccaaagcgaacagcagatgctggcgaacaaaaagaatatcctgtacatggcggaacaaaaggccattgtgggagatcagattgttcagcagcagcgactgaacgccttgcttgacaagtctaccaagtatcaaaaccagatggcggagaagaccaaggcgctacaggataccgccggaatgggtagcaaggagcaggagagataccgggccaatgcgcagatggcggctgactggaaaaacaacggcggatctttaagtgaccctggatttaaagcgatgcaggccgcaagcgataaattctacgcacagcaagatgcgcaaatgatgaactggaaggccgggtttactaacgcgtgggctgacattggcgaagaagttaatgacgtatacaccaatatcggggatatcactaaaaacgcatttaacggcatggcgagcgtgctgactgattttgtcatgactggtaaggccagctttagcgacttcgcaaagagcgtgatcactgacattaccaacatgcttatcaagatggcgctgtttaactcgctttctgccgcgtttggtggtggtggaacgttcagcttcgccagcatgttcagcaaaggcttttctggcggcggttacactggcgacggcgggaagtatgagccaaaaggcgttgttcacggcggggaattcgtattcaccaaagaggcgacgcaaaggttaggcccggaaaacctgtaccgactaatgcgcggctatgcaagtggcggcctggttggtggtaacgcaagttccggatctggaatcaccaacggcggcaacgtcgcggcgtcggcggctatggtgtttaccattggtgatattaacatcacgatgggttccggtcaggatagcaaggggctagagcagggcgtaaggcagatcgtgaacgatatgttcaccgaggctttgagccaaaacgggcgcattgcgaagttcgtcaatgagaaaacgaggaggtagtagtggattcctttaaatggtgtacacaaatccaaggaggggcggcgaaagtcgccgtatccaataacgttcgggcgatcagcttcggaaatggctacatccaaactgcgtcgagcggcattaacacaaagcgccggactgttccgatcgtttatggcggttcggattgggaagcggtttataacttctgtcaggatcacgtaacaaagccttttgtgtggaaggcaccggatggaagaatgggcgtgttcgtcgtaactgccgactccgttaaccttgcgccgcagggtggcggggtgtttgaggtaacggctgaattcgccgaacgcttcacttcagccggataatcaaaaagcgccctttacgggtgcttttttttggcctatgatctggagtcaattagaggagggcttacgatgacagccaatgtttcaaaagattttgcgaactgcctacaaaaacttttccccggcgagatcctaacgctgatcgatatcgacgccacaaagttcggcgggcaggtctaccgattccataacgagaacgtcgcctatacaaccgaggagcttttggccgcggttaacggcgggacgcttcagccaaagatgatcacgtttcgcggcgagcagtacggcccgcgaccgttcggcctgggcgggatcgcaatgtcgagcgatggcacagtggaaaagccaacgctgacggttagcaatattgatgcgcaagcgagtgctcttattcgagcctataacggccttatgcaagccaaagttacggtatgggttttggtcaaggaattgctacaaaacgacggcagcgttaaagagggcgattttaggcgatttatttactacatcgagcgcccaaaacaggtcgacccgcaaaaggcaacgttcgaattaacatccgtgtttgatatggatggattaatgatcccggcccgtctgacgcaaaccgtttgctattgggcgcagcgtgggtggtacaagtctggcaaaggctgcgactacaacgggcagaacggatacttcgacaagttgggaaacagggttgaagacccgtcgcaagatgtttgtggcggcttggtttcttcttgcaggcttcgttttggcaatgaaccgttgagttttggcggttgtgcgacagcaacattgaaaagtggaaggtaatatgttaactccgaaaatcaaaatgcagatcatgcagcacgcgaaagaagtttacccgcatgagtgcgcaggtctggtgacgcaaaaatcacgagtgcaaaaatatcaccgactcgacaacgtttcgccagatcctgagaaagaatcaatgcctgatgaaacgcagtatgcgctggcatcaatggagggcgagccgatcgccttcgttcactcccacactggcgatggggcaaccacaattccgagcgccactgatttatgcttttgcgatgagtctggcttgtcgtgggttatcgtctccatcccggaaggtgatatgcgaatcattgagccgaaacgccgacctctgattggtcgcccctgggctttgggcgcttacgattgctatggcctaatcatggattttcacaagcgccacggcgtcacactaaaagatcggcgattgccgttcgaatggtggaagccggaatacaaagagaatctttaccaggattactggcaagaggacggattcattgaaaacactggcgagcctgaagttggcgatatgatcatcttccagattcaggcggaaaagtggaatcacgctggtatttacgttggaaacaataacatccttcatcacgcgtttggcaagctgtctcgcagggatatctattctggatggtacgagcagcacaaggttttaatttgcaggcacaaggagcttaaacatggcatcacatacaaagacgattaaactatccggttccctggggcgtcggttcggtgtcttccacaaacttgcggttgattcagtcgctgaatgcatccgggcgctgtcttaccaggttgaggggtttaagcctttcatgcagagcaaggttggtttaaatatgcgcttcggcgttgtcgccgacggaaaaccaatcagcgcgaacgaccttgcgacttttgccgtggcgagggagatcagaatcattccgatcccaaaagccagaaagaacggcgggttgttgcaggtcgttatcggagcggcgattatggttgcggccttctttactggcggcggctcgctggcggctatgggcgctttttcatcggctgcattcatggctggcggctcaatggttttgggtggcgtaatgcagatgatcgcaccgcagatgggcggcaatatgcgggcgagcgaatcgcctgagaataagccatcgtatgcgttcggcgggccgattaacaccacggcggcaggttatccaatccagttgccatacggttacagattggctggcggcgcattgttcggttctggatcttacgcagaagacaacaactaattaagccattcgctttttagcctgggggcgtagcctccgggctttttgtcgtgtacaattgcgagactattaacaggaggctaaacgatgactaatatcaaggcccgtaagggaggctcaagcaagccgcgtaccccggtagaaatgccagataacctgatctcaaaagacaagatcaagttattgctggctgtttctgatggcgaggtcgttaacgacttcagtttgaagcagttgcatttcggcggcgtcccggttcaaaacgaagatggaagttacaactatgaaggcgtgattgctgagtttcgccccggcacgcaaacacaggactacatccagggcttcagcgaatcaagtgctgagttccaggttgctcgtgaagtcactcacaacacgccttatacgcttaccgtatcgaacaaaaatctgtctgctattcgctttcgcctgttatggccgcgcgtgctgactcaaaaagataacggcgatatggtcggatcggttgttgagtacaagatcgagatggcggtagatggcgcaagttatcagacctacctaactggcaaaattgacggaaagaacacgactggcggttacgatcggagcattcgcgttaacctgccgcaaaacttcacgtcgcaggttcttatccgcgtgagccgagtaacgccggatgctgacggggtgaaggttgtcgatgccttccaggttcaatcctacgctgaggtcattgatgcaaaattccgctacccgttaacggccatgctttacgttgagttcgatagcgacctgttccagaaccagatcccaaccatctcactcaaaaagaaatggaaaattattcaggttccgagtaattacgatccgattaatcgcacatactccgggacgtgggacggtgtttttaagtgggcgtggagcaataacccggcatgggtgctttatgacctgatcatgaatcagcgctatggtttagaccagcgtgagttaggaatcccggttgataagtggtcgctgtatgaggtggcgcaatactgtgatgaacttgttcctgataatcgcggcgggatggaaccgcgctatttgatggatgtaattgttcaatcgcaggttgaggcgttccagttggtaagggatatttgttccgcgttccgtggaatgacgttctacaacggggaaagcctttcgattatcgtcgataagccgcgcgatccggtgtacctgtttacggctgataacgtcgttgatggcgttttcgttcggacgttcccaagcgaaaagacgatgtacacgtcgtgcaacgtcatgttcgacgacgaagaaaaccagtacgaacaggatgttgaaccagtattcaaccctgacgcagccatgcggttcggccacaacccgaccagcattacagcgatcggatgtaccagaaggacagaggcgaaccgccgtggtcgctggattctgcaaacgaacctaagcgccacaaccgtttcgttttctactggcctggaaggtatgattccttcttgcggcgatgtgatttacgttgcagatccgcattggcaatcggcctttaacctggtgctatcaggccgcgttatggaagtgtctggcgtgcaggtgttccttgcctaccgctgcgacgcgaaggctggcgacactctgatcctgaatacagacgacggcaagccagtgcgccgcacaatcgccagcgtttcggcggacggtaagaccatcacgctaaatgttgggtataactttgacgttgcgcctgacagcgtattcctgatcgagagcgatcagcttgcagcggaacagtatgtagtaacccggattgaaaagggtagtgatgacgacgaatttactttcgccatcacggctacgcagtacgatccgaacaagtatgacgcgatcgataacggggtaattaccgatggccgaccaacttcggttgtcgaccctgattcaatgggcgcaccgaaagacttaacgattagctctttctcccgcattgttcaggggatgagcgtcgagacgatggttatcggatggtctgccgtgcagtatgcaaaactgtacgaggtgcaatggcgcaaggacggtggtaactggaacaacgttccgcgcactgcgacaacgcaggttgatatcgaaggcatctatgctggcgagtatcaggcccgcgtgaggtgcattagcggtgggaatgtagcgtctccgtggtctgaattggcaaccgccacactgaccgggaaagtcggagcgccaaaaggcccgattaacctgtttgcgtcggacaatgagatcttcggcattcgagttaagtgggctatgccggaaggagcggaagacacggcatacattgagctttaccagtcgcaaagcggaaccgatcaggacgcaagcctgcttactctgattccttacccggcggctgaatactggcactcaattttgcccgctggctacgtgaacttctacaaagccagaagcgtagaccggatcggcaatgtttcagaatggactgattacgctcgcggcatgtcgtcgactgacgttaacatcatcacagatgcgatcctggatgaaatcctggatagcgacgcgatgaaggaactacaggaaaacgcacaggatagcgcggcaaaactcaatgactacgcgaacagcatcattcaaaatgcgctggcgaatgatgcggacgttaggaaaatgacgaaggagaacggtaagcgtaaggcagagatcgcgcataccacggtgctgattgccaacgaatcagaagcgagggcggctgaaattacgcaacttaaagcgcagattgatgaagatatcacgtcgcagattacgatccttaacgaagccctggcgacggaaagcgagacgagagcaacgcagattggtcagttgcaggcagattttgcggctgatattgacggcgtaaaaacaacaatgaacgctggttttacgcaggttaatcaggctattgcaaatgaaagtgacgcgcgtgcaagttccgaggcggcactagatgccaaaatcgggcagaactccgcagcgctaaaccagaaactcgactcgtgggcgaacgttaatggcgtcggttccatgtacacgatgaagttgggcttgaggtacaacggtcaggagtatagctccgggatggccctacagcttacctcaagtggtggaagcgttgtttcgcaggtgctgttcattgctgatagatttgctatcatccgtaatgcggcgtctggcgcgtacacgctaccgtttgttgtgcagaatgaccaagtgttcatgaataacgcgcttattcaggacggttcgattaccaacgcgaagatcggtaacgtcattcagtccaacaactttcaggagaatgttgcaggatggaggcttgataaaaacggcgtatttgtcaactatggctcaacttctggcgaaggttccatcaagcaaacgaaccagaacatcactgttcgagatggtagcgggcgcgttcgttgccagttgggtaggatcactggatcatggtaaaattaatgccgggagaaatcccggcttaaccaaaggaggcagacaatggcttatggttttcaatcatgggatgcgaacgggaaccccaacaactatgggatcgtccctgtttcagttgctggatatattgcattagcgcaaggccagaaaagcggaacgtggtattacaacgtcccgcctgggttgaggcttggtttcttttgggtcgcaaatcaagaccagtacggcacatcgaagaggcgaattaccgttagtggtaatcagatcgttgtttcagatgcgccagatgatgcgctggaatcaggcgtctacccggcgacgcaaggttttattgtcgttcaaattatgagttgatgattatggcagattacggaattttacttaccaatgatagcggcaatgtttgggtttcgcctcaaagcatcccactggcactactatcaaagcagagcatcactcttaggggtggtactaactccgatgaagtaagatcggtaacttacgacacgaatcacccatgcgttccgttcgtggtctttcatggatcttcgccacaaggtgcattcacaaaaatcaagtacagcggaaacacttgcagcgttgttttttcttttggtaagcaaaacgtatatgcggaggtttattttttctccgtgttcccacagccaaatcctggttatgggcttgcaatttgggatgaaaacggcacgctgattttgaccaatgaaaccagaacactttcagacgtacagacctacggcactggttttaatctaaacgtcactaacggcgggaagtgggcggttagtcctgttcagttaggcgcgatcgttggtgttgttcgcgatccctacccaagaccatttcagggcgactattgcgcagcggcattctttaacggctcaagcacgcaacttaccgcatatctaacgcaggcaccaggaggagccgccagcgatctaacctacgtcaatatgaaaaacacctgcatcgctattgattgcgcaagatacgactaaaagaaaggggccatacggcccctttttctaccccttgagatttttgatctcctcttttaattcatcaacttgagcagacagagctttgattgcgcaaattgcatccatcaaaagagcattattgtcaagcacaagtttcttattttcaactacgttaccctcatcatcctgataggatgcgctgctttctttaacgtagcacgaatcgatatctcgcacctgctgtgcaataactcccctacgctcgcgtttcttaacatcatccttataggtgaacttgaccagattcattgctttgatgttttcgagtgactgcaaaccatcataagcaacaacattgtctttgtagttaatgtcagatagaccagcaaaaacaacgttgccataagcagtgcttgcaatattaccatctgatttaaactgccaatactgcgtattaccgccagttccccatttgctgacctcaataacggcacgatgttcataacccctatgttcctcaagccacatagcgcaacgcgcaccgttaccattaatgttgaaccgtgagataaatgatggagatttaaggatatcaccattattcccatttggatcgctagttggccacgctacaaaagcatcattaacggtactcctcacagtcccatatgacacaacacttccgcgaagatcggcagccccgccaactcgcaacgtgctcgacattgtaacagcgccgcgaagatcggcagccccgtcagcacgcaacgtgcttgacattgtaacagcattgctaaagtttgcattcaacccggtaacagcaaagttcgatgcatcaaaaacaacctgcttcgcgctgttcatatctccattagggcggaagtacattccttgaccattttcagggattgagtacacgatcgcattgctgttatttgccctaatagtgcaaccgttcagggtcagcgtggcgtttcctccaggaacgctaattgcctgcggctggctgaacgtgttagctacgttggtgcgcgggatcgtattatcattagccatcaaatagtcagacggtgaattatatacaattccagaaggctccgtgtcaatccaggtataaccagtgcgatcaatgattggccccgtaatcgaccctttgttagcctgtacgtttacatgattcaaccacagttcaggaacccatccgccgggagcatgaatataaacatcaaacgaggagtctgtgtttttcaccaccccaagattaatgcgtctggtgtcgtttggtctggcagcaatcagggtgcgctgagtaaaccaagtgtcaatattattactggttagcgtatcgggaagaccgcggccagaaatcgaaaagatatcaaccgggagatttgcagtgccataaccagtacctccgccaatgatgaactgagcaaatgcgtagccatcaccagcgttcttgacgttggcgatcttcatccacttctccccagcgaaagtgccagtaattttatccggcacctggacgccagccacaaggtcgacaacctgatcacgaagattttgcgtctgccccttcgcagtttgcgcgtcgttcttcgccgagttggccgcagtttctgacgcttttgcattggtctccgaggttttggctgcggtttctgatgcctttgcattggtctccgagtttttggccgcagtttctgacgctttggcgttggtctctgaggtcttcgctgcggtttctgatgcctttgcgttagtctccgacgtcttcgcagcattcttggatgcagcagcattggtctctgaagtctttgcagcggtttctgatgcctttgcattggtctccgaggttttggccttattctccgaagatttagcgttcgtctctgaggtcttcgctgcggtttctgacgctttggcgttggtctctgaagtttttgcagcgctttcagacgcagccgcagccgtagcgcttgcgcccgcagcttcggaatctgccctcacctgatcggcaagactttgcagagcttcgaaatcgaagttcttaaagaagtcgacagcatccgcaatttgagtttcctgtgactggtagtagcgcagagtttccgcaacatcttgcgccagtccgtcaacggtcagcgagtcacttaacaggatcgcgtaatcgctagacgctacgacagcgccttttgtggtgatggctttaatttcagtatcgctaaccaccttgtttacgacggccatttgaattggtgacgacaaaaacataatcgtcgcaccagggcgaatcagcgaaagcgatgattgccattttgtgccagtcccggtaacggttccgtctgcggccatagccgctttgccttctctgtatagtgccatgtttttaagcctcattggttgattgagtaacgcagataatagcatcaatgaaccgataaaaaaaggagcctttcggctcctttagttgtcaaattagaacgggatatcatcatcgaaatccatccccgcattcccgccgctgttttgcggcttaggcgcttgttgcggcttgggttgttgaggctggccccacccggattgctgattgccgccgccgctttgcgaaggatcgcgctggctgaattcgagttgcggcataatcatttcgttgtggctgtaaattgtgccgttgtgctcgcggttaacgatctgaagcgtccggcaggttacgctgatcaccttatccatttgcagcgcttcgtcgtaccacttaatcatgttttcttttgcaaagaaaactgcgcggtagttcgtgtaaattgtttcgtcctcgccatcacgattgcggatcttcatccgctccgacaggtctacggcgtacattttccacggcccgttattgttgctgccctctttgacataaggcgcttttcggattacccctgttacaacatgcattgtcattcctatggggcggcttcccgcccgttaaattagttgaaagatgaaatatcttgcgcttctggttcaggttttgattctaccttttccggctcgcgcttcgcaacctcttgcggtttaccggggttaaatccgtttgccggggtgactttcagttctgcctggcgtttggtgatatcgtcttccgtcattttccactccgccggggttaacgtttgtttcgccagcttatagatctcacgaagcgattcgagatcttcgcacgcgtcaatgcgttttttgaagtctttcggtgtcattttcgtaatttctgcatcatcatccgcctgcttgatacctagcgctgcggccagcgcataacggcgggcgtaagatgttgttgagccgtatgcttgttcgacggttttactgatcggcatattgtactgaaacgccatgaactcgccgctttcatgcaaaaacatagtttcgaggtgcatcaccttttcggtgctcgtatccatcatggattgaatgaccataattttgttcttctccagcgccggggaaatagcgtcgaggatatccccaagattcgcataggtgttcccaagatggttgttcttaccgcttttctttgcggccacgaagccagattttgccttgattaatgcggctgcgatggtggtaaatttttcagatgtacgcatgataaagtttccttttcctaattggtaatgcgcactatatcacaagtgcgcaccagtgtttagctatttgtgccgtatacgtccgggaacatgtatttcacaaactgaggagtcggcaaaacaacttccgccgcgtttgactcatatgatggccatgaatcgtgcttcacgcattcagcatactgatgaatcacgctttgatactgtttgcgaccgatctcgatctgctggctggtcagggtgaacgccagcggagcaaacggtgattttttctcctgcgttagcagtctgacaactaccgggcgtttttcgttgtaagtcttcacgaacagatcgcgctgcaatgccatcttgagatagtagcccaagttgaaggcgagtcgcccgaaatcgtcaggcttggaagattgcgtggttttgtagtcggtaatcaccacgacctcgaaaacctcatccgggttgaacccccactccttgatgagttcgggatcggaaacaacgtcaacatgatcgagtcgaaccttaaccttgacgccgaagatctcaccgaagattgacaattcacgctgtgctgtaggcgattcgatacatgcggcgtgtcgcgggttagccagcatcacgctgcgcatttgaacaacggcatcgaaatcaacatccttaaccagcttgcgcccggagtttatcgcggcgctttcgtcgcacagttcaatagcccaccaaacatttacgtcaatcccggcgcgatatgccatttccagaagttccgggtaatccttgttggacgtcccaatcaggccacacgctttcagcttcgcagacagtgccgacttcgacgtaatcagatctttaacctcgcccggagaagtcgcccgcaggtactcgccattaaactttgccgtctcaagcatacaggtatgcgaacaggttccgaacgccagcgcggctgcttcctcacgcactttgaatttccagtgcgccggggatgttgcgtaaatctcgccgaggcttgagccgctaacgtattccgcgcaccaggagttaggatcgtggtaatcatcgttggataattccgcgttggtgtatgccttaaaaattgcttcagccattggtatcactccatttgtggtttcgttgcgttaagtatacgcatgacgattccaggcgcaagtcaaaaagtgctatccgcagttggttaaaaaacgagcgaaatttacgtaagatttagtaagatgcatcttacgtgatttttcctatatatttcatttagttaatgcaaatcggtaagatggtaatatccctataggtaaatatccatgaaaaatatggcgcgaaatccagcgaaaaaagacacgcaccccggagaaatcttaccaagattgatagatacagatagagtaataataataatattgttatttatcatatacttactatctatatattgcggttaattggttaaattttgcgcgaaatttacgtaagattcatcttactaaatcttacctaaagtggttcgaccagctgcaagccactgaatttcaggcataaaaaaaggtaagactgatttgctcaatcttacctaaattctggtcaacatttaatcatagaagcgacgatgccctgtacaacttgcgttcaaatccgagcttaaagttgtcaccgttcggaacgataactttaagatcccgatcgtcagcagccgccagcatatcccgatctccacgacggcaaactacccgcatttctcgcttaccttctccgccattgcctttatacctgtacgccacgatctcgacgtttgaaggtatgatgcaggcccaaacgtcgcacttgaacgaactggcaatattaaagtgcatcgcctcaatccaggatcgagcaaggtaaatcggcccgttaccgtcgtcgctctgattggtcactatcaccgatccgaatgtcagatcgccagccaacatcttctcccgaccctcctcatcaatgaacagcatgttgcaatactcatcatccggcccatcctcatgcactagttgcattggtagcgcgtgaattagctcctgtctgcagttctcgtgagtttttacgccaaccagatatgatttgatatgctcattttcaatgccctcatagagcgttacaggcgtgctatcgacggcctccgttctgtttaaaactgccatcactctttcatgatctgccatctttccgtagtcatacccgttatcacgagctacctgcttgtttctcttgactacgtattcttgcggaacctttccgagatagcgcccaagaatgttgatgcactcgctatacggctggccgcttaacttcattaaccagccgatccccttatcggcaccgcaaccgccacagtatgcgccgccatcacctcgcgtttccagcttgtcagtccagcggaatcggtctttgccgccgcagttcgggcagtcctggtgcttgccgttgaagtatcgagagtggatgccgcaaatgttctgcaacgcctcgcgccacatgccagccatgtacggcaaaacctctttttcatcgtaaaaatccacgtcgtaacccccaaataaaaaacgcctacacgagaatgataacccggcaggcgtttagtgtttagtcaaattgtgctatcggactacgcggagcatttcgcggcggtcgcatcggcgcgtcactggcttgccgttgctgtcaaatcttaaatcaggtcggcagaatgaggcgcgaaaacctttgcaattgttccgtcggtagctcttatgtactagataagcgccatcggctgagatcataccgcgcttacgccactgctgaacaacctggatactaactcccaactcttttgccgttccagcgataccaccgaaggcatcaataaccagctccatccgcgcagtcaacccagctcgaacctcatccttcagcacgtagtaaccagtcggtcgcttgcgtttcttcttatctttcccgcgcgacgttccgttgttgccgttcaaggttcgcttatcaaccattgccatttgctccataattcaaccctcatagcattttttgttaaacctgataaaatgttccatgtattatacacgcaactatgcgaatgacaaattaggattgacaatggcaagcacagaagaagacgtagcatattttaagcgactatttcgttatgaaggcggaacactgattcgcaaagttacaaccagtagtcgtgcattcgctggagactccgtagggtgcgagaacaacgttgggtatttacaggtaagcgtaaaaagcaaacccctatacgttcaccgaatcatttgggaaatgcataatgggcctatcccagaaggaatggagatagatcacatcaaccaggtcagaacagataacagaatcgaaaacctgcgactggtaagccaccaagtaaaccttaaaaaccaatcgatgaacagtggcaatactagcgggcacgctggcgtaagctggtttaagcgaggcggtaagtggagggcaacaataaaggttggcggaaggcaaatacacattggttacttcgcgtcgtttgagtcggcagttgccgcacgaaaagcagcagaaaaacaatatggttttcatgataaccacggagcagagaaaaagaaatgagcttatcgattgagcaacaaatagatctatacgcagacaaaatcccggcaatccaaaagagatttaccgttggaaatatcgttccgtatccatatcaggctgtggcttatattgagacagccaaaagaatagcaaactacaccgcaccgttttacattaaggcttcggtttccgccgggaaaaccatcatgatcgccatgctcgcagcgcagtgcaaggcaatgaacttacccatgatggttcttgctcgccaggccgagatcgtgaagcaggattccgaggagatcagtaacctcgacgttccaaactccgtttattgtgccgggttaggcacgaaggcggcatacttcccgatcgtcgtcggatctgaagggacggtggttaatggcctgtttaaaatgctgggcgactacgtgccttcagttctggctattgacgaatgccaccaggttgactggcaagatctggcggaagcgatcgccaacaatgaatcgttcgagtacatgagccgaccgaaggataagccgtatcgcgtgaacggggaactggtcgatgccgaccacccatacgacgaaaaattcgacgacgtagaattcggcggcggtcgcacgcagtacactatcgtcatttgtgagttaatgcggaggtgccttgagaagacagggcgagaacttcgcatcgttggctatactggttcggagtttcgcggcgtcattccgattttacaggaagacaagagccagcctggtttttggcgcgagcagatcaccgacattaacacaaactatcttgtcgagttcggatcggtggttccgacaatttttggtgatactgaatccgaagggttagggtatgacctatcagaattccacggttccagtcaggacggtacgcaggattttagcgcggaagaattgcgcaagatggaaaagaaaatccatgaatccggcgaaatgacgaagctgattatgcaaaaggtcgtggagcgtgcgaaaacccgaaacggagttctgataacttgcgctggacagcggcattgcaaggaggcggcgagctatctaccgccggacgcaacatacgcgatcatcaccgaaaagacgaactcaaagaaacgcggcgaaattttggataaggcgaatcgcggtgagatcaaatacatcttccaggtgatggccctaaccactggcgttaacgttccattttgggatttttctgtgatattgcgcaagatcgggtcgcttacgttgcttattcagcttttggggcgcggaatgcgacttctgaaggactggcaaaaacagccgccttactcgtgggtgaaagaagatcaccttgtctgggattttgccggaacaatggatgacctgggccagttgtatttcgatccgatcttggagcaggcgcaataccaaagacgcaagagcagcaagaacggcccgaaaatttgcccggtatgcaagggggaaaatagcgagtacgcccgcagatgcattcacaaagacagtaacggcaatcggtgcgaatacttctggatctcgcagaggtgcgaagaccagaaagacccgcgaacagggaagattaaaatcaaggggtgttacgctgaaaatgatattgttgcccgccaatgcagatgctgcggcgttcagcttaaagaccccaatgacaatctcaccgggaagcactatacgcagaatgactggtatgatgttgtctggttcgatatcggcttgactcgcaatcagtccgggatcatcttcaattacgtgttactgaaccatgacggcgagcgattcaccgcaagggaaaagttcttcccggaatcagagaatcagatttgcggcaagctgtggcggcaaaaggcagtcttccagcacgttagcgacgcggtaatgcgtggcaagttgggcggaatgaaaaacgcccgcaagatcctggagtatgcggaatacttccgcgcgccgaagcgcgtaacgcatcgcatcaacggcaagaaggaggacattatttcccgcaaagactttggaggcgaggagtgattacagacaaaggggattacctcgaatattacggcgggcctgtaaaggcttgcccacttgaaaaaatcgaccagatgaacagcgtttcgtggctgcgttacgaataccccgattatctgttctggcatacggttaacgagggtagcaagcacaaggcgagcgccgttgcagatcatcaaatgggattgcttaaaggcgtaagcgatatccttgtgctgattgggctgggcggaaaatacccgttcgccgccattgagctaaagcgccagggtaaatcccaggcatcgccagtgagcaaggagcaacgggaattcctcgccgccgtccgaagccgtggcgggttcgctgccgtggcctatggattcgagcagtttaagatcgcgtttgaagacgcaatcaaatagcactttttgttaaaactacccggcgcgagtcgggtattattctcccatcgaaacgaagaacggagtatttaaaatgaaaaagattattgctttaattgttctatctcttgttctcattggttgtagcgaaaaaccaaaaacatatatttgcggtaatgaatcgtttgaagttactagcgactatattaaggtggttcgcggtaatagcgctggcgttttaattgatggcattggtgaaaaccagtataagctggttacaccacttggaacggctttttatactgttaataaaaacaccattgatattaaagttagcgtttatcagaacactttaacttgcgaggttaagtaataatggcaaaagatatcacagacaaagacactcacgacgcgttcacgactttcgaacagcttgagcgtgaaacgttcataggcaacgcgcttgccactggcggacactatcaggccgtcaagcctgataaattctaccaggtaacgggcaaccgctacgccgggagcaagacgccggatatcgtccgcgacaagtggtcaaccgatcgcagccttattgcttacatggaggagcgttacgggccatacgacctggacgccgccgccgaagaaagcaacaccgtctgccctaagttttacgacgaaaagaccgattgcctcaagcgctggtgggggaaaaataagcacgtatggcttaatccgccttactcgttcccggatccctttgtgctgaaagccattgagcagatggagcatgacaaccagatcgatattttgcttcccggcgacaactctactgcgtggttccgcgacgcacagaaggcagcggctgagatcatttggattgtcgcagacgtcacggaggacgaagacggaacgcaactaagccgatccggtcgcctagccttcatcaacggcctaagcgggaaaccagtcgacaacaacaacaagggtagcgtgattttcatcatgcgcaaactcaagccgggcgaggagcaaaaaacgttctacgtcccggtaagcgaaatctgcccttcattaactaaaaagcgcatgcgcaaacgtgggatctgaaaaatggaacagcttgaatctttcaccgaatacctccacatcgtcgtcactctgctggacaagtacggcttcatcggtacggatgaagaaaagatggccttcgccgatagcatcgatggcacttatcaagaattcatggataacggcacgccgcttgctgactggcccgcgattcttgagcgcgaattgctggattttcgggcgcgtgaaggtgcggaatatttcgcgaaacagcactaattgttaaacaatgcccgccgcgagcgggtattattgttccatcaaccaatcaggagctaacgccatgaacaccaaaaccattgccgacaccatcaagatcgcacaagttaagccgcgcatcgtatctcgccacctgattaacctttctcgcctgtgcatggccgactacgtggcgaagcctttagagaatggccttgatggtgaaatcggtgcgatctacttccgcgccgcgcacggcatcgaagaaattcacatgtacgagcagatggcggaatgcttctgcatttacggtgacgaatgatgattgtagaatctggccgcgctgccgtatggcagcatgccaaagaggctggcattagtgacgatatcgtgatgatcgcaaagtatttcgatatcaaggatatctccattgtgttcaatgggaaatttacctatcttcatgagcgaccactgaagcgaacgcgtatagcggttgcgacgcgggcagaggccgacgcgctgaagatgttcattcacgaatctaagcagaccaaaaaatattacaagtagcgggagtgttgagaatgcgatatattgcgatcctgattacggcggtggttctcactatcgcaatcttcaactacgcaattcaattgggataaattatgcaacctaaaatcacagacgaagaatttttagccgcccgcgaggagggcaagacctaccgcgagatcgccgaagagttcggcatgaacgttcgcagtgttgagcgtcgcggcgttcgacttgcccgccaggggcatttgcacggtaacaatcacgtagcgaagcacatcccggacgggttcggggtcaaaggcacatcgaccatgattcgcgcgaacggtgatgaagttgtgcgctgggtcaagtcagaagtagaccgcgaccgcatgatcgctttgatggaggcggcgcaagcatcattctgcgaagacctacctcgcgctgaaccgcagcctaaggatgaatctaagttttttattgaggatcagctcgccctgtatccgatcttcgatttgcacatcggcgcgatggcccacaagcacgaatgcggcgagaactacgacaccagcacggcggaaagggttcttaaccgcttctttgactactccgtttcggttgccccgcagtcgaaaaagtcggtcttgctggtcggcggtgacttccttcacagtgacggcctggacgcagtaaccccggcaagtggtcacgttctcgatcaggatagccgttacgcgaaacttgtttatgtggctattcgctccttgcgccgagctgtgtcgctactgctgagtaatcacgaagaagtagaggtgcaggtaatcgaggggaaccacgatcaggctggcatgatctggttgcgtgcagcgctcgcagcgttctatgaaaatgagccgcgcgtattcgttgacgtcagccctgcaattatgcatcgtaccgtgtggggcaaaactatgctgggctacactcacggccacacgatgaagaaggcagaaacgcgcctcgccgcaatggctacagacttccgcaaggaatttggtcaatgcgactacatctacacgcattcgggccattggcatcaccagaccgtaacggagcactcgttagggattgacgaagtacacggccagttaggggccaaagacgcttacgccgctcgcggtggttggcgctcatatcgccaggcggcggttattctgtacagcaaagaatatggcgaagtaggccgctttatctaccgcccgaacatgtaaccacaacggccccgcgaggggccaacaaggaaaaccaatgaatagaaatatctgcattttcgatctcgatggcacgttgtccaatggcaaccaccgtttgcacctgctgccgaaaaaagatctccacctaaccgaaagctggacggcgttcaacatggcggctggcggcgacgctcccattacggacacgatccgggtaatggaggccatgcgcgcagcaggatttatcgtcatcatcctgaccgggcgaagtgatgaggcacgcgagatcactgaaaaatggctggtgcaaaatggcgcatcgcattacgacctgctgattatgcgctccgcctccgacaaccggaaagatacggttatcaaagaggaaattttacgcaagattggcattgagcgaatcgttgcagcgtgggatgatagccccactgttattgcgcacttccgtagcctgggtatcacaacttaccaggtctgcgactacggcgaaaaccttcacgaccatctgaaatctcatggagtagacaaatgaaaaatgtaatcatcctcaacggagcgccgggcatcggaaaagacaccatcgcggaaatcatcgcccgcaaatgggagtatcggatcctgagtttcaaatcaccgatgtttgacattgcgcgcgccatcctgggtgcaaccgactttgcccgcttcgccgtccgttaccacgaccgcagccggaaagaagtaaagtgcgactttttaggcgaccgctcgccgcgtgaattcctgattcacattagcgaaaatttcgtaaagccgacgttaggcaaaaagcagttcggcaagttgctttgcgattctgtcgtgaattcgcctgttagttgcgtcgtcagcgacggcggatttgacgaagaagtagagcacatcgcggcgcacgatagcgtaaacgtctttgtcgttcgcctgcatcgtgacggcatgactttcgagggtgatagccgcaagcatattagccgcccggatctgatttgcgaaacttatcacgaattcgattttgatatgacgactggcgagccggaagacgacgcgcaaaaaatccttgatatggttttcgaagggtattaatattctctacgtaatgcctttattatcaccgccttaaactttgggagccttaacaggttcccttttttttgttctttatttggcccaacgcatatatcatcgcattatcacttaactaacagaggttgcatatcatgcgtgaattcatcaacgcggcaaccaatggtagcggcggtgttaccctcgcaggctctgcgaccgggcaacttatcattgcggccattggtttatttttcatgattctattcggctcattcggcgcgtggttgcgctggcgagattcaaaggcgctgcgtgaagcgctggaagccggggatatcaaaacggcggtgaagatcaggagtaaataatatggggattaaaacgcgggttacattcgcagcggcgatggcgatcgctgtcgccttcctcccgaaagtggaggacacgaaatacaaggtttataccgatatcgctggcgtttcgacggtctgcgaaggcatcacagggccggacgtaatcaaggggaaaacctatacccggtcagagtgtgatgcacttttggagaagcacatccaggtcgcaaagcgtgtggttgacagcaaaatcaaagtggccgtgccggacaccttccgggcgtcgatgtacagcttcactttcaacgcgggcggtggcgcatactccggcagcactatgctgaagttgacgaaccaggggcggctatatgaggcgtgcgaacagctttaccgctggacgtactatcgcaacccgaagacgggcaagatggaaaaatcgcgcggcctgcataatcgccgggatcaggaattcaatctttgcattaaggatctaaaatgagtagcttaaattttcagcgagcattggcaatcggcttcatcgtgtgggcggtcgcactggtttccggttgtgcttccagcgtcccgatcctttccgatctggtgggcagcaagccggatatgacggcgcaagtcggtgcggagaacgtgaaacaggcggttggcgtgacgaacaaaacggacacgtccagcaagcaggaaacgaccttcaaagaatcggcagttggcaaggttgacacttccaacaaaaaggcggtgacgacctccagcattcacgcgaaccagattacggcggagaagatcgagatccgaaacgacggtagcggaagtgtgattccgtggctgattggtgcagttggtgccatcatgttcgctgtcggtgttttcggtatgtggcgggaacgaaaaaataaaggggcgtaagccccttttttcatatgtaccgtttgacgtgcagcagcgccacgccatcttcatcattcaacccatgttcaaccttgtttgtcgcggccatgccttgatatagcaaggtgagcgcggcacgcaagtaattttctggtgtgatctgattcacgcaaacaagcctgtgaacctccgttatcagatcttccacctgctttcccgaatagggcttcatcgtcgagttgctcaatgtgcatcatctcccacatgtatttgttttccatcccttcaaacgaccggaagttaaatccaatctccctgttatccgggccagtgcaccacaccacgccgttttttccgtccaggtatccattcgtatagcttcgcgctaaaaactccttagaaaccattgaggcgaacatacggtgtgacacgttggcagcttttgccatgcgtggcgattcgcggtgcatgtaaacgaacttcgcaaaatcttgccgggtaaattcccggcgagactcgcagaatcggtaaatgtcaaggataaacattcattacctcatgaacgaaggattaacgaacacttccgaatcaatcacgcagacgaaacctaattcctccatcttcggcagcaatttttccttaatccttttactcaccccggactgacctttgaagatcttcagattgcggcacgcgttatagatgctctgaacagtcatcacgcctttcgactgcttgcaacggctggcgataacatcgtacacggccttaatctccgcaccctcaccagcgaagccggacgaatcagccgacgacaaatacgttttgctcaactcatgaaacatgatgatggcttcgtcgatcgtttcggttccgatcttcttcgagcgcttgccgccaggttgccagttgcggatagtgtggattaccgacgccaggcgcatcacctgcttatcgaatttacccatcgcaccgcgcagcatcgtatgcgaatacttcccgccgtcgcctaattccggctctaactcctggcgggccttgttcagccgacgcatgcctgcttcagtcacttccagcttgatatacgattcagtcataatgtcatgaatgaggcggaagtaatcagcgcgtaaagacttgtcgatcggctcataggtcgaattccctttttcgtcaatgaacacacgctcacctaaccgcgtttgctcgcgaaccaaaaggaaacgctctgatacaccgatcccgcgagagccggcctgcataatggcgtcgatggtttcatcctgggcaattacgcaaatgcagcccaaagcctcgaatgacatattgttgctaacgtcggcacgagcgatcgatacgtggcctttatcccatgctttgagcaccagttcgctgttcgtcttcttaccgccatcgtttccatacgtgatccctaaaaggctgttaaccgccgtcgcctcatcggaaataacggcaaagtttccctgtcggttgttaatcttcgccagaccttccggggtggtatcagataccgggaaagttaggtcacacaatttttctaacttctcctcaagttcgtcacggtcttcaaaaagtttcaccatatcagattgcgataactccccttttagcgcctgcttgttggcggacagcttcgccatgattttcttacgctctttctttcgagactcgttaatgcgttcgacttcggcgacaataggatcgatggcaagcgagttaatggcagacttaccagcggaaggcggctgcgacgtgataacgtaaagcgttgtcggttgctcgctgccgtggtactcgacccaaaagcggcccatcatcgcggcggatacggttccgagaaagtgcatgtaagcggatgattccgggaactgaacagaacgcgctgcatttagcgccagcttgccgacaacatcataatcattggcgatcgagattgttggatacttatccgcgtttacgtcgatatctttgggctttggccagaatgaaacggagtcacgatacccgttcgcacgaatcgcaacgcgcaggggactgatcccctccctttctgcgatggcgataatatcttgcggtgatacgcggtcatttaaaaacatgcccttgctcctgattggttaatcgttcggctaatcatatgccgtattaaatccgagatccagtgataatctaaacacgcttgaaaaacgcgcttggattatcggggcgcatggccccgaacccgtcacaggtatttagcttcgaaagtcgttccgtccgatacactgaagccaacttcctcgcggtacagcgtccagcggcatccatcacgatcgaagatgtatccggcaaccgcgccgagcgcacgaccgctttctacctggtagcgcttgccgacgctgaaggattttttcatcgggttgctatggtcaaggccgacgcattttagcgttttggtttttagttcgatgaacgtcgcaatcacctggccaccagcgccagcaataaacaactcgccgctaacgcctaccgacaaaataacgcgcttcttcttcagttcgacgctgtcatataccatcattgacacattgccttcatcgtcgacgcgggcgggataaaggttattttcgtgtatattaatagcgcggcttgacgtgcatttaatcttgattgacttcgccatttattttctttctccgatctcgatgtacaggtttaccaaatccagaaagtcagccttgcttttgcaacccaacttaaagccaacgtgcgactcaattttattttgcatcgcagccagtgttgcgccgccattattcatcctgagaacttcgcggcatacttcggcgagcttttgagatatcatttcttcaccacctttatttccatgccttcgcaagcgctcttgatatcattaatcagacgattaagccttaaatcagtcattacatggtgatgacgtatatcaataattccagcaacgactaacagcatgacggcaaagataaaaccaccaggcccggacatacacaaaacagttaacatcatcaagataataaatttcatttccgttttactccgttgcgtttcgatggggtgattctacccgactttcgccgggtagttttagaaattcgtgctattctcgataattcgcctggaacacggcgcgggcaaaacctcgcggagtaatggaacgcagcattttagtcctttctgaccttccacccaaaaacttccaggcccaaaagaaattcacgccttctactccatccggcggcgtgagccgtttcggttcgacaaaaccgtttccgtgccatatgcacgttttcttcgtgtaattgtcacagtggggcattttgggatgccacacaggctcgttcggagaaacatagccaccgaagtcgcgcggatggaaataaaaatccggctttcgccatagtgacgataatttcccgaccgggttttcgaccatccaggggcaaccatacttattgcctaattgctcgaccatcttcgcatcccctgctgcggataatacgtcattatcttcccttacgtgcttgattccgctatgcgctaacagcgtgcatggcgggaaagcgaaaatgaagtcaggatctggaatgccgagaatcgatcgcttaacgtcaaaatccttgtcaatccaaatgttaacatactggatatttgggtgaaccattcgaatgctatattctccgtggtcgccggagtcggcgttgaaacagtacaccttgcatcccttgatggcccacggcaggcccatgatgccggagccgtcgaacatgcagtaaataaccttttctttcatgctttccacgcctcaatgaacattctgttcgattccagcgtcagcgtgacgccagccagggaggactgaatgagacgaccgcccggaaccgtcccgatgatgtagcggcctttcgacttcgtgatcgtgatctgagtgaagccggaggcgcggttcatgcggagaacgacgcggccatgagcgttcaggacggcgagaatggaatcagtcttcggatggttcattgtgtagctccttcgtttgttggtatggggacagtatgccactatcccgctgtgttgttttagcaaaacgtgctattccggaacgcaggtcgcgtaatcctggctgatgtagatcgtgcgctgaacgcgaggttcgagatcaccgagttcctggatggtaacatcgttgcttcctacccggcacggaaccgatccgaaaataaactcgccagtctgcttgtcgttgatttgccatacattaccgccttcctttttgacaaccaggaaaggcgcactgtctgcactgaactcttccgggccacgaccgtagtaatgcgtgatcgcagctttggccgcagcgctgaaggcatcggtaacgtcattggtcgccttgtctcggatggccttgatacgttcttcaggcgatccgatgatgtaggaaaagctgttcgaaatggtaactgttcgcattatattttaacctcgttttggtggatgaagtcggcgacgtaatggcattcgatcgggttctcgatacccgccagcacctcgcaagacccgttattcagtagctggcaatgctggcactccgcaccgccaacactggcaatgacaatggcgatcccgttgcatgaaccgccgaacattcgatgagggaagtggtaagcatcgcaggtgcaaaccacctccccggcccgccgtttcctcatacctggcccttctcgatgcagaaaacccaatcacgagcgtcaaccgcaaagcgtgcaacgccgtcgagcaccacgaagacagtaaacccgttgacgccgcgacccttctcgatatcggtcacggtgcggaacagatcgcttgcgccatattgaattttatccccgacgactacatccgcaaatgctttcatggttaatctcctgactggtttcgatgggttaactataccaggcctcgcggcccggcgtttagcaattcgtgcttatttcactgctttcttcgctgccttgtacgcctctttgaaagccggaacatcttcgaccggaatccagaagccggagccatagccatcgtcatagcaagggcattggtcgcagtagtcgccccaggttttctcttctccgccgacagagaatccagtgggcattttgcataacgcttcctcaaccgcttcgatcttgtcggcgtcgctatccatgataacgaagttccacttgccgttatactcgctgcccaggttgattgattcgcgttgaagtttcatagctttagcccctttggctcaattcgtttcgttgaagtcatcatagcaaagccgatcggatggattttaacaaaaaatgctattcctgcgattgctgattattccaccgattcggaatagtggaatagatggtgattgcacctgattccctggtgattagttttgacgaatcatgattgcttttgattgtttcattttgtgcaacgattttgtgagtgtttcaggatttgcaacgaattgcataaatgtatgcaccatgcacgcaatttgccgatcgaagccagcaaaagcgccaggtgtttttcgccaacatttacgtcgtgtggaaatgtgggggaggaataatcttacctaaaaattgcgcaaaaagtgaccaacataagcctataatagatatataagtatatgataaataataatattattattattactctttatctatatatatgtttggtaagatttcttcggggaggttatggattcctcttgcgcaagccatagtttttagatgttccgccgcgaaaaaatgtatatagggatatataggggatgacagcaaatcttaccaaacacgcttaaacccttttacggcaaggcttgcgggtggtaagatgacattcccacacaagcaaaaacgacgtaaatgttggagaaaaacacatgcaatataaaggctatgagttcgaagaagtcgacgtgtccgagtggatgcagtacgacgcagataagcaggcagcttaccatgaatggctgcaatccatcacgtttggcggctcaccaggggtagacgatcggccagttgctgaaaagtcacccgccgcattcactggtaatcgttcgtccgagatccggcgcatgttcctggatggcgggcgacgtatccagatgacggcggaggagttcgcggataagttcggcgttcatccggtcgacaaccatttccgcaggccgttgctgaaactcctggagccgggagaagtgttgcgggtgagcctgggggcggggttgatctccgtctttaccgagttcgacgcaatgactggctcaaacatggaggctgaggcatacaggcggcagggcgctatctccgagagggaaaggattaagggtttagtggccgctcttgctgtagactttgccggacatgccctggccgggatttacaaggcgaacttgttcgcggctatcgatcttggattgaccgccagcgatatcagccaggaagcggccaccacgcaatagcactttttgttaaaacccggtcagagcgatcgggtattgtctttccatcgacaacgaaccgaggaaaacgaaatggtcactcttatcacatgggaacacgaaaacagcgagccagtggtgcgcgaattcgagaccgtagcggcatgttacaacctggcggcaaatggtggcttttacaaggcgcagatcgttaacgagttcggggttgttgattatgaattttaaggcgagcgacgtaaaacctggcgtggtctacggatcgcgcctcaataaccgcctttggcggtgggacggcgaaactatgtggactaaaggcgagggcgatgttatctggcatgaatgcggctggccataccccaccatgagccgcctcgatatcgcttattatctttcggttggcgatatgcacgagatggaagatagcactttttgctaaaacactgctgtcgagatccggtattatttattcatcgacaacaaagaggagatgaaaatgagcaagaagaatccatattcaaccagcaactaccataacgaacacgtcatgcgctggcactggcagaaactcaaagaacgccaccttgcacgccatggcaaataatcacaatagcgccgcttcggtggcgctgtatcccaaccataaaaacggcttacaccaggaggattggccatgccacgattttcagcaacaacaaaacttcgcaccttcgccgggatgccgatcccatactcatcaaccaaagccgtccagggcagcgagcacggcgtatacttccactggtgcggcaagtggcgcttcaccgtcattcgcggcttttacgtgacctgcgaccacgtggatattaccgactattccggcggaaaccaggttcatgagttcaaaaagcacgaatagcactttttgctaaaactcgatcgggtcaatgcggtattattaccccatcaaaacagaggagcaaaaacatgattggcaaccacaacaacgaactgaacgcagcagaccaccgtcgcgccgtcgagcagaacttcaactcgcttaaagtagcctgcaatgagatgaaagcactgcttgaactgccgtcatgggatccacaactcgaagactactatgacggcctccgcgccaaacgtgacggtatcatcaaccgcctgcgcctggccgggatgttcctgtaaggagaacgcaatgattcacgaaattaagtctggcaagcaagtagtggcgaccataacgcagcgccacgttgtagccttccagattaacatccctggcaccttcgatatgcagtcgcttgacgtgccagtttgggccaacacagttgccattgatgccgacggctcgatttgggcctacgagtcgaccgccgaagatgtttgcatcccggactactcgcgcaaatcctgggttgattgcgggccttccgaaaacaagatgaggtcaattggggagatggattgcttccctgattgggagaaatcgaagattgacattcgcggtctgaaatagcacgcattgctaaacgcccagtcagaggaacgggcataatagccacataccaaacaacggagatttaccatgaagcagatcgtcaaaaacgcagttgtcgccatagtcggaaccaacttcgaaggcaagaaaagccgcattcaccttttgcacgttggcaatgatggcaaaattcgcggagctttccattacggcgagcgcggggagcaccttcacagtgacttgcattccgttatccagctaaccactttcaacgaatggcgaacccatcgggaatggctgccggaataccattacgagggtttgattgtcgaatagttcgttgccgacccaacgaaacttaccgcccgcgactataagcgcatggcacgcaaggcgcacaaactaatgaaacgcacgccagaagatcacgtctggcatgttttcgcaaatcagctttgaggtggctggatgatacgtttatcagacttcgatcgccactgcttaacagggcaattcggcgaaaagccagtaatgtgcaagatctcgaaggttaagggcgagccgtttgagcaaatcagaacgcttataagttttgccagacgaaaccgcctttacatccaggcacgcggcggactgttcgcaaagcaggttcattttgcgtatggaacagggttctacactggcggagacggtgttgacctatcgcctaaaagggttaggctgcgtgagataatcgaacgcggctacgtttggactaacgggatctactaatggaaacggtaaaagtaatttgcacgcacgctggctattcgccgctatcaacctatttcacacctggccgcgagtatgacgccaggttcggccctggccttgatgaagtgtggattttgcaggacgaccagggaaccactgaggacgaagaattttggcccgcctgccgtatgccggacgaaaagatcgccatgtacgccaataggccatacgaaaacaacgttttgtttgaggtgaaagtatgaaagtaagcaaaaagaaactcgcgctgtattgggccttcttcctggctggcctggccctgcatgacagcgtgggctggcagactatcggaatgctgtgcatgattattggcgtatgccgcctgtcggagattaacggattccgccggggatatcgggcagcattcagcggcgaaaaagaatagcactttttgttaaaactgccgtaacgtcatttgataaagtggcgttactgaagtgaacaatccaatcaggagcaacgcaatgaacgataatttaatcgcactgctggaagaactgaattcctacggctgcgcatacatcgagctttcgagcgagcaggttattgaagtcgcaatcgacgatgacgccgggtttaccagattaagggtggcggcaggggccgaagaggaattcgaagactgcggcatccgtgaagtaacaaaccttctcgaataccaccaggtgaaggagatccgctaatgaacaccgtcaaacttatggttgtcaatgcggcccgcgagcgtgagcgccaccttatcggctgcgtattcgatgccgtcgaggtgcacgaaccgctaggcacagtgcacgtaatccagggcggatacctgaacgaattcatcgtcaacccgctggacaccgacgaagatttgaccatccgtgttggtagcgagccggaaaacgcgcttttccacctgcggaaagtatcgaaggcgtcgcagcgcaagttgctggttcgcgcactgaagcgcattgcgaaggagcgcggttacaccgacgcatacatccgcaagttcggcacgttcgctggcgtaggcgattgggcgcggtcatgggccgacttttatttcaacaaatccggcgaattctgttccgtgcatacggactggctgcatggcacagaacacgatcccgtaaacggccacgagtggtacgaattcattgaggcggaattagacgccctttgatagcacgaattgctaaaacgaaagtccggggatggtgcatactatccccacactaacgaacaaaggaaattacccatgaacagcatgaaaattaacctgatcccgtccgacaacttcaccaaagacgacgacccgctgttagccgccgttattcgcgccgggatcggctgggcgcttagtgatgcctcgtgcgaatcatttatgcgtgaaccgttctcacgaatcgcggagcttgaaaagcaggttgctttcctgactggtgaacttcaggcggctatcgccacgatcgagaaggttcgggaaatcatgcgcaccgaacctggctatgacgttgaagatcacgcgcgagttttgcgcatgatggccgacgctttcgcaaagctccagcaatagcacgaaccacaaacacgaatcgtggttgctacatgtcaaccccatcaaagataaggaaaaacatcatgatttacgcaattattgccctggtggttcttattatggccctgtatgcgtgcggctgcttcctcatgcgggccttcctgaaatctgcggattctaccgacaaagaagatctttatcctgtgctttgctggccctggattacactttccgccgttggcagcgtgatcatttcccgcaattttaagtggtgaggcgatacatgaacatcaaaatgtggttcaacggatttacctacaacgtgcgctttcgcgggaagttctattactggtgtgatgagggcggcaagcgctggcggattcgcccacaccagaaaggcgcgagttatgagttaggcattgccgaggcgcaggggcgcgtcgagtgggttaagctgaaagtcatggatggcctgccaaatagcacgaattgctaaaaccgatcaggggtaagctggtatagttaccccatcgaaacgaaacggagttacagcaatgaaaatcaaaataaccaaaatcaacactcttaatggcgacggctcaattaccctggaagaatgcggcctcaaaatcggcgaagttcttgaggtcgacggccacttcaacgacggctcctactgtgtgattgctccgcgcaatagcgagtttatccaggctggtgacaatatcagcgtgagcgaagatgaatgcgaggttgtggaagaatgagcaacaaaatttgggttctaacctacaccattggaaccaacgaggggcgcaaatcgcgccgcctcatctgcgacaccaaagagcgggcgattaggcagcaaaccgttcttggtggcgaggttgtcgagtatctccgcaagcctgaagcgttcaaggtgaactggccggaaggcatggatatcaacggcgctttagcgagcctgcgtgagatgcagcacaacccgaagacgtggagcgaccttcaatgcctgcgggcagagccggaagtgaaggccgacccgttcaccaatattcgggcgcagcacgcggaatggtcggatcgccagttcggtaacgttgggccagttgggccgctcaagcacctggcgaaagaggcgatcgaggccgccgaagcgccggatgacattagcgagttcgccgatatcatcatgttggtatgggacgcaacgcgccgcgccggattcagtgatgagcagttggctgaagcggtggcggaaaagctggaacggaacaagcgtcgggcgtggggcgaggtcaaagatggcgagccttgccaccacgtgaaaaattaacgaaatcgaataccgtttaaagcgcctgtaagccattctggcgggcgcaaatttaaggagtgcgattgtatgcctgaatactcaaaagtcgaagatatgccgattggcgcaacgattacgggtatccgtatgagtgagtcggtcgacacaatcgagccgctggcgttcccggttacgcaggtggagacggacagcagaaaagggttcatcttcatctacaaaaatttcaatagtccgctgcgtgttgaagtgttcattgctcgcggaacctgggtagaatgggagaaggacaaatgttcggactgaatgaagcgcagtacaacgctgtgaagcgcatagcaaagcagatggccgcagaaacaaaagacgccatcaagaaggacaagaagacctacgatcaggtcgccgcgaagatgatcgataaacattgggcgcaaatcaacacgctggttactcgcggccagtttatctggatagctggctacctggaaggccgattcggtcgcagggatggcgagtatgaataaaaaacaggcaaacgaatcagcgacctattgacgtcctcgcgctgaccgggtaacttgaaccacgtagacacaagaggcggtaaacatccgcaagtctggccccgctttggggcatttacaaaaggggttgtgatgcagtacaagatcatgctcacagcaagaaaaatgggcggcttttgcaagtcctgcattcaagagtttagcatgacgattgaggcgaacgacaccgccgacgcggtggagaaagcaaaaaagcaatccggcgttaatctggatacgcataaaatcaacataaactacataagggaagtcaatcaatgttaactctgattattgcactgttaatgctgttcataggctatcatgttggcgcggctcatcttgtcgagcgcctttctaagcgggtacatgaaggcacgtttgctgccatgatgtacaataagaaaactgcacgttgggaaaaaattggcgatccggatggtatcgcaaagcgcataacgttttcgccgcttccgtatgttgactgcgagcctttcgtgaaactacagaagacgcttaatcggcgaaacaaactgatatgatacaacgacccgcttcggcgggtttttttatgcctgcaatctggtatactcgcaactcaacaaagaaggagggctaaaa
